(19) United States
(12) Patent Application Publication
(10) Pub. No.: US 2026/0144872 A1
(43) Pub. Date: May 28, 2026

(54) GENETIC EDITING OF TARGET GENES TO ENHANCE NATURAL KILLER CELL FUNCTION

(71) Applicant: NKARTA, INC., South San Francisco, CA (US)

(72) Inventors: James Barnaby Trager, South San Francisco, CA (US); Ivan Chan, South San Francisco, CA (US); Chao Guo, South San Francisco, CA (US)

(21) Appl. No.: 18/997,909

(22) PCT Filed: Aug. 2, 2023
(86) PCT No.: PCT/US2023/071537

§ 371 Date: Jan. 23, 2025

Related U.S. Application Data
(60) Provisional application No. 63/370,357, filed on Aug. 3, 2022.
(60) Provisional application No. 63/489,965, filed on Mar. 13, 2023.
(60) Provisional application No. 63/498,166, filed on Apr. 25, 2023.

(51) Int. Cl. A61K 40/15; A61K 35/17; A61K 40/32; C07K 14/47; C07K 14/54; C07K 14/725; C12N 5/0783; C12N 5/10; C12N 9/22; C12N 15/113

(52) U.S. Cl. CPC A61K 40/15; A61K 35/17; A61K 40/32; C07K 14/4702; C07K 14/5443; C07K 14/7051; C12N 5/0646; C12N 5/10; C12N 9/222; C12N 15/113; C07K 2319/02; C07K 2319/03; C12N 2510/00

(57) ABSTRACT

Several embodiments of the methods and compositions disclosed herein relate to immune cells that are genetically edited, for example, using Crispr/Cas, to modulate, reduce or otherwise eliminate expression of one or more endogenous genes. In several embodiments, the edited cells are engineered to express a chimeric antigen receptor targeting a tumor antigen, for example CD19, ligands of the NKG2D receptor, CD70, and/or BCMA, among others. In several embodiments, the editing enhances one or more aspects of the efficacy of the immune cells in cellular immunotherapy including cytotoxicity (e.g., ADCC) and/or persistence.

### CROSS-REFERENCE TO RELATED APPLICATIONS

[0001] This application claims priority to U.S. Provisional Patent Application No. 63/370,357, filed Aug. 3, 2022, U.S. Provisional Patent Application No. 63/489,965, filed Mar. 13, 2023, and U.S. Provisional Patent Application No. 63/498,166, filed Apr. 25, 2023, the entire contents of each of which is incorporated by reference herein.

### FIELD

[0002] Several embodiments disclosed herein relate to methods and compositions comprising genetically engineered and edited immune cells for cancer immunotherapy. In several embodiments, the present disclosure relates to cells engineered to express chimeric antigen receptors (CAR). In several embodiments, the cells expressing the CAR are also genetically edited in order to enhance their expansion, cytotoxicity against target cells, persistence (e.g., lifespan) after administration, and/or to reduce potential side effects when the cells are used in cancer immunotherapy.

### BACKGROUND

[0003] As further knowledge is gained about various cancers and what characteristics a cancerous cell has that can be used to specifically distinguish that cell from a healthy cell, therapeutics are under development that leverage the distinct features of a cancerous cell. Immunotherapies that employ engineered and/or edited immune cells are one approach to treating cancers.

### INCORPORATION BY REFERENCE OF MATERIAL IN SEQUENCE LISTING FILE

[0004] This application incorporates by reference the material contained in the Sequence Listing XML file being submitted concurrently herewith: File name: NKT089WO_ST26.xml; created Aug. 2, 2023, 1,364,361 bytes in size.

### SUMMARY

[0005] Immunotherapy presents a new technological advancement in the treatment of disease, wherein immune cells are engineered to express certain targeting and/or effector molecules that specifically identify and react to diseased or damaged cells. This represents a promising advance due, at least in part, to the potential for specifically targeting diseased or damaged cells, as opposed to more traditional approaches, such as chemotherapy, where all cells are impacted, and the desired outcome is that sufficient healthy cells survive to allow the patient to live. One immunotherapy approach is the recombinant expression of cytotoxic receptors (e.g., chimeric receptors) in immune cells to achieve the targeted recognition and destruction of aberrant cells of interest.

[0006] In several embodiments, there is provided herein population of genetically engineered and gene edited immune cells, comprising genetically engineered immune cells that express a cytotoxic receptor comprising an extracellular ligand binding domain, a transmembrane domain, and a cytotoxic signaling complex, wherein the extracellular ligand binding domain targets an antigen expressed by cells of a target tumor or cancer the immune cells are genetically edited within a target sequence in a MED12 gene and within a target sequence in a CISH gene; and the edits yield reduced expression and/or function of each of the MED12 protein encoded by the MED12 gene and the CIS protein encoded by the CISH gene, as compared to an immune cell not edited within the target sequence in the MED12 gene and the target sequence within the CISH gene.

[0007] In several embodiments, the target sequence within the MED12 gene comprises any one of SEQ ID NOS: 997, 938-944, 996, or 998. In several embodiments, the target sequence within the MED12 gene comprises a plurality of target sites selected from SEQ ID NOS: 997, 938-944, 996, and 998.

[0008] In several embodiments, the target sequence in the CISH gene comprises any one of SEQ ID NOS: 1013, 153-157 or 463-466 or 1012. In several embodiments, the target sequence in the CISH gene comprises a plurality of target sites selected from SEQ ID NOS: 1013, 153-157 or 463-466 and 1012.

[0009] In several embodiments, the extracellular ligand binding domains targets an antigen selected from BCMA, a NKG2D ligand, CD19, and CD70. In several embodiments, the extracellular ligand binding domains targets a BCMA antigen. In several embodiments, the extracellular ligand binding domains targets an NKG2D ligand. In several embodiments, the extracellular ligand binding domains targets a CD19 antigen. In several embodiments, the extracellular ligand binding domains targets a CD70 antigen.

[0010] In several embodiments, the transmembrane domain comprises CD8, CD28, or a portion thereof, optionally wherein the transmembrane domain comprises CD8a or a portion thereof. In several embodiments, the transmembrane domain comprises CD8 or a portion thereof. In several embodiments, the transmembrane domain comprises CD28, or a portion thereof. Depending on the embodiment the transmembrane domain optionally comprises CD8a or a portion thereof, in combination with CD8 or CD28.

[0011] In several embodiments, the cytotoxic signaling complex comprises a CD3zeta domain and/or the cytotoxic signaling complex comprises an intracellular signaling domain of an OX40, 4-1BB, CD28, or a signaling portion thereof, optionally an intracellular signaling domain of OX40 or a signaling portion thereof.

[0012] In several embodiments, at least a portion of the genetically engineered immune cells are engineered to express membrane bound IL-15 (mbIL15). In some such embodiments, the cytotoxic receptor and the mbIL15 are optionally encoded by the same nucleic acid molecule, optionally wherein the nucleic acid sequences encoding the cytotoxic receptor and the mbIL15 are separated by a nucleic acid sequence encoding a 2A peptide. In some such embodiments, wherein the cytotoxic receptor and the mbIL15 are encoded by the same nucleic acid molecule, optionally wherein the nucleic acid sequences encoding the cytotoxic receptor and the mbIL15 are separated by a nucleic acid sequence encoding a 2A peptide. In some such embodiments, wherein the cytotoxic receptor and the mbIL15 are encoded by the same nucleic acid molecule, wherein the nucleic acid sequences encoding the cytotoxic receptor and the mbIL15 are separated by a nucleic acid sequence encoding a 2A peptide.

[0013] In several embodiments, the cells are further genetically edited within a target sequence in the CBLB gene, wherein the target sequence in the CBLB gene comprises any one of SEQ ID NOS: 164, 165-166 or 453-456 or 1005-1008.

[0014] In several embodiments, the cells are further genetically edited within a target sequence in a disintegrin and metalloproteinase domain-containing protein 17 (ADAM17) gene comprising any one of SEQ ID NOS: 682-687.

[0015] In several embodiments, the cells are further genetically edited within a target sequence in a hypoxia-inducible factor 1-alpha (HIF1-a) gene comprising any one of SEQ ID NOS: 750-760.

[0016] In several embodiments, the cells are further genetically edited within a target sequence in a DGKz gene, and the target sequence comprises any one of SEQ ID NOS: 688-723.

[0017] In several embodiments, the cells are further genetically edited within a target sequence in a GSK-3B gene, and the target sequence comprises any one of SEQ ID NOS: 724-749.

[0018] In several embodiments, the cells are further genetically edited within a target sequence in a LAG3 gene, and the target sequence comprises any one of SEQ ID NOS: 761-789.

[0019] In several embodiments, the cells are further genetically edited within a target sequence in a TIM3 gene, and the target sequence comprises any one of SEQ ID NOS: 790-825.

[0020] In several embodiments, the cells are further genetically edited within a target sequence in a TRIM29 gene, and the target sequence comprises any one of SEQ ID NOS: 826-835 or 1009-1011.

[0021] In several embodiments, the cells are further genetically edited within a target sequence in a IL-1R8 gene, and the target sequence comprises any one of SEQ ID NOS: 836-865.

[0022] In several embodiments, the cells are further genetically edited within a target sequence in a CD38 gene, and the target sequence comprises any one of SEQ ID NOS: 866-874.

[0023] In several embodiments, the cells are further genetically edited within a target sequence in a FBP-1 gene, and the target sequence comprises any one of SEQ ID NOS: 875-889.

[0024] In several embodiments, the cells are further genetically edited within a target sequence in a INSIG1 gene, and the target sequence comprises any one of SEQ ID NOS: 890-934.

[0025] In several embodiments, the cells are further genetically edited within a target sequence in a CDK8 gene, and the target sequence comprises any one of SEQ ID NOS: 949-955.

[0026] In several embodiments, the cells are further genetically edited within a target sequence in a CCNC gene, and the target sequence comprises any one of SEQ ID NOS: 956-961 or 999-1001.

[0027] In several embodiments, the cells are further genetically edited within a target sequence in a ID3 gene, and the target sequence comprises any one of SEQ ID NOS: 963-969.

[0028] In several embodiments, the cells are further genetically edited within a target sequence in a SOX4 gene, and the target sequence comprises any one of SEQ ID NOS: 970-976.

[0029] In several embodiments, the edit to the target sequence or target sequences is made using an RNA-guided endonuclease. In several embodiments, the edit to the target sequence or target sequences is made using a Crispr/Cas9 system.

[0030] In several embodiments, the immune cells comprise Natural Killer (NK) cells, T cells, induced pluripotent stem cells (iPSCs), iPSC-derived NK cells, iPSC-derived T cells, NK-92 cells, or any combination thereof.

[0031] In several embodiments, there is provided a population of gene edited immune cells, wherein the immune cells are genetically edited within a target sequence in a MED12 gene and within a target sequence in a CISH gene and the edits yield reduced expression and/or function of each of the MED12 protein encoded by the MED12 gene and the CIS protein encoded by the CISH gene, as compared to an immune cell not edited within the target sequence in the MED12 gene and the target sequence within the CISH gene. In several embodiments, the gene edited immune cells are genetically engineered immune cells that express a cytotoxic receptor comprising an extracellular ligand binding domain, a transmembrane domain, and a cytotoxic signaling complex and the extracellular ligand binding domain targets an antigen expressed by cells of a target tumor or cancer.

[0032] In several embodiments, there is provided for a population of genetically engineered and gene edited immune cells that express a cytotoxic receptor comprising an extracellular ligand binding domain, a transmembrane domain, and a cytotoxic signaling complex, wherein the extracellular ligand binding domain targets an antigen expressed by cells of a target tumor or cancer, the immune cells are genetically edited within a target sequence in a MED12 gene, wherein the target sequence within the MED12 gene comprises any one of SEQ ID NOS: 997, 938-944, 996, or 998, and the edits yield reduced expression and/or function of the MED12 protein encoded by the MED12 gene, as compared to an immune cell not edited within the target sequence in the MED12 gene.

[0033] In several embodiments, there is a provided a composition comprising a population of genetically engineered and/or gene edited immune cells as disclosed herein.

[0034] In several embodiments, there is provided a method for the treatment of a subject having a disease or condition comprising administering to the subject a population of genetically engineered and gene edited immune cells as disclosed herein.

[0035] In several embodiments, there is provided a use of a population of genetically engineered and edited immune cells as disclosed herein for the treatment of a subject having a disease or condition. In several embodiments, the wherein the disease or condition is an infectious disease, an autoimmune disease, a cancer, or a tumor.

[0036] In several embodiments, the immune cells are NK cells.

[0037] Also provided herein is a population of gene edited and genetically engineered immune cells comprising immune cells that are (i) genetically engineered to express a cytotoxic receptor and (ii) genetically edited within a target sequence in a gene selected from among the group consisting of ADAM17, HIF-1a, DGKz, GSK-3B, LAG3. TIM3, TRIM29, IL-1R8, CD38, FBP-1, INSIG1, MED12, MED 13, CCNC, CDK8. ID3, and SOX4.

[0038] In several embodiments, the immune cells are genetically edited using an RNA-guided endonuclease.

[0039] In several embodiments, there is provided a population of gene edited immune cells comprising immune cells that are genetically edited within a target sequence in the MED12 gene. In some embodiments, the immune cells are genetically engineered to express a cytotoxic receptor. In several embodiments, there is provided a population of gene edited and genetically engineered immune cells comprising immune cells that are (i) genetically engineered to express a cytotoxic receptor and (ii) genetically edited within a target sequence in the MED12 gene.

[0040] In some embodiments, the cytotoxic receptor comprises an extracellular ligand binding domain, a transmembrane domain, and a cytotoxic signaling complex. In some embodiments, the extracellular ligand binding domain binds to an antigen expressed by cells of a target tumor or cancer. In some embodiments, the genetic edit is within a target sequence in the MED12 gene comprising any one of SEQ ID NOs: 938-994 or 996-998. In some embodiments, the genetic edit to MED12 reduces expression and/or function of the MED12 protein encoded by the MED12 gene, as compared to an immune cell not edited within the target sequence. In some embodiments, the genetic edit to MED12 reduces expression of the MED12 protein encoded by the MED12 gene, as compared to an immune cell not edited within the target sequence. In some embodiments, the genetic edit to MED12 reduces expression function of the MED12 protein encoded by the MED12 gene, as compared to an immune cell not edited within the target sequence. In some embodiments, the genetic edit to MED12 reduces expression and function of the MED12 protein encoded by the MED12 gene, as compared to an immune cell not edited within the target sequence. In several embodiments, the edit to the MED12 gene is made using an RNA-guided endonuclease. In some embodiments, the immune cells are natural killer cells.

[0041] In several embodiments, there is provided a population of gene edited immune cells comprising immune cells that are genetically edited within a target sequence in the ADAM17 gene. In some embodiments, the immune cells are genetically engineered to express a cytotoxic receptor. In some embodiments, the cytotoxic receptor comprises an extracellular ligand binding domain, a transmembrane domain, and a cytotoxic signaling complex. In some embodiments, the extracellular ligand binding domain binds to an antigen expressed by cells of a target tumor or cancer. In some embodiments, the genetic edit within a target sequence in the ADAM17 gene reduces expression and/or function of the ADAM17 protein encoded by the ADAM17 gene, as compared to an immune cell not edited within the target sequence. In some embodiments, the genetic edit within a target sequence in the ADAM17 gene reduces expression of the ADAM17 protein encoded by the ADAM17 gene, as compared to an immune cell not edited within the target sequence. In some embodiments, the genetic edit within a target sequence in the ADAM17 gene reduces function of the ADAM17 protein encoded by the ADAM17 gene, as compared to an immune cell not edited within the target sequence. In some embodiments, the genetic edit within a target sequence in the ADAM17 gene reduces expression and function of the ADAM17 protein encoded by the ADAM17 gene, as compared to an immune cell not edited within the target sequence. In several embodiments, there is provided a population of genetically engineered and gene edited immune cells, comprising genetically engineered immune cells that express a cytotoxic receptor comprising an extracellular ligand binding domain, a transmembrane domain, and a cytotoxic signaling complex, wherein the extracellular ligand binding domain targets an antigen expressed by cells of a target tumor or cancer, the immune cells are genetically edited within a target sequence in a disintegrin and metalloproteinase domain-containing protein 17 (ADAM17) gene, the edit yields reduced expression and/or function of an ADAM17 protein encoded by the ADAM17 gene, as compared to an immune cell not edited within the target sequence in the ADAM17 gene, and the edit to the ADAM17 gene is made using an RNA-guided endonuclease.

[0042] In several embodiments, there is provided a population of genetically edited immune cells comprising immune cells that are genetically edited within a target sequence in the MED12 gene. In several embodiments, the immune cells are also genetically edited within a target sequence in the CISH gene. In several embodiments, there is provided a population of gene edited immune cells comprising immune cells that are (i) genetically edited within a target sequence in the MED12 gene; and (ii) genetically edited within a target sequence in the CISH gene. In several embodiments, there is provided a population of genetically edited immune cells comprising immune cells that are genetically edited within a target sequence in the MED12 gene and within a target sequence in the CISH gene. In some embodiments, the immune cells are genetically engineered to express a cytotoxic receptor. In some embodiments, the cytotoxic receptor comprises an extracellular ligand binding domain, a transmembrane domain, and a cytotoxic signaling complex. In some embodiments, the extracellular ligand binding domain binds to an antigen expressed by cells of a target tumor or cancer. In some embodiments, the genetic edit within a target sequence in the MED12 gene reduces expression and/or function of the MED12 protein encoded by the MED12 gene, as compared to an immune cell not edited within the target sequence. In some embodiments, the genetic edit within a target sequence in the CISH gene reduces expression and/or function of the CIS protein encoded by the CIS gene, as compared to an immune cell not edited within the target sequence. In some embodiments, the genetic edit within a target sequence in the CISH gene reduces expression of the CIS protein encoded by the CIS gene, as compared to an immune cell not edited within the target sequence. In some embodiments, the genetic edit within a target sequence in the CISH gene reduces or function of the CIS protein encoded by the CIS gene, as compared to an immune cell not edited within the target sequence. In some embodiments, the genetic edit within a target sequence in the CISH gene reduces expression and function of the CIS protein encoded by the CIS gene, as compared to an immune cell not edited within the target sequence. In several embodiments, there is provided a population of genetically engineered and gene edited immune cells, comprising genetically engineered immune cells that express a cytotoxic receptor comprising an extracellular ligand binding domain, a transmembrane domain, and a cytotoxic signaling complex, wherein the extracellular ligand binding domain targets an antigen expressed by cells of a target tumor or cancer, the immune cells are genetically edited within a target sequence in the MED12 gene, the edit yields reduced expression and/or function of the mediator complex subunit 12 (MED12) protein encoded by the MED12 gene, as compared to an immune cell not edited within the target sequence in the MED12 gene, and the edit to the MED12 gene is made using an RNA-guided endonuclease. In several embodiments, there is provided a population of genetically engineered and gene edited immune cells, comprising genetically engineered immune cells that express a cytotoxic receptor comprising an extracellular ligand binding domain, a transmembrane domain, and a cytotoxic signaling complex, wherein the extracellular ligand binding domain targets an antigen expressed by cells of a target tumor or cancer, the immune cells are genetically edited within a target sequence in the MED12 gene and within a target sequence in the CISH gene, the edits yield reduced expression and/or function of the mediator complex subunit 12 (MED12) protein and the CIS protein, as compared to an immune cell not edited within the target sequence in the MED12 and CISH genes, and the edits are made using an RNA-guided endonuclease. In some embodiments, the immune cells are natural killer cells.

[0043] Also provide herein is a population of genetically engineered and gene edited immune cells, comprising genetically engineered immune cells that express a cytotoxic receptor comprising an extracellular ligand binding domain, a transmembrane domain, and a cytotoxic signaling complex, wherein the extracellular ligand binding domain targets an antigen expressed by cells of a target tumor or cancer, the immune cells are genetically edited within a target sequence in a hypoxia-inducible factor 1-alpha (HIF1-a) gene, the edit yields reduced expression and/or function of the HIF1-a protein encoded by the HIF1-a gene, as compared to an immune cell not edited within the target sequence in the HIF1-a gene, and the edit to the HIF1-a gene is made using an RNA-guided endonuclease.

[0044] In some such embodiments, the immune cells are optionally edited within an additional target sequence in a target gene to yield reduced levels of expression of a protein encoded by the target gene, as compared to an immune cell not edited within the additional target sequence.

[0045] In additional embodiments, there is provided a population of genetically engineered and gene edited immune cells, comprising genetically engineered immune cells that express a cytotoxic receptor comprising an extracellular ligand binding domain, a transmembrane domain, and a cytotoxic signaling complex, wherein the extracellular ligand binding domain targets an antigen expressed by cells of a target tumor or cancer, the immune cells are genetically edited within a target sequence in a target gene selected from ADAM17, HIF-1a, DGKz, GSK-3B, LAG3, TIM3, TRIM29, IL-1R8, CD38, FBP-1, INSIG1, MED12, MED 13. CCNC, CDK8, ID3, SOX4, and any combination thereof, the edit yields reduced expression and/or function of the protein encoded by the target gene, as compared to an immune cell not edited within the target sequence in the target gene, the immune cells are edited at an additional target sequence within a target gene to yield reduced levels of expression of the protein encoded by the target gene, as compared to an immune cell not edited at the additional target sequence, and the edits to the target gene are made using an RNA-guided endonuclease.

[0046] In several embodiments, the edit to the target gene is made using a Crispr/Cas9 system.

[0047] In several embodiments, the extracellular ligand binding domains targets an antigen selected from a ligand of NKG2D, CD19, CD70, and BCMA. In several embodiments, the extracellular ligand binding domains targets a ligand of NKG2D. In several embodiments, the extracellular ligand binding domains targets CD19. In several embodiments, the extracellular ligand binding domains targets CD70. In several embodiments, the extracellular ligand binding domains targets BCMA.

[0048] In several embodiments, there is provided a population of genetically engineered and gene edited immune cells, comprising genetically engineered immune cells that express a cytotoxic receptor comprising an extracellular ligand binding domain, a transmembrane domain, and a cytotoxic signaling complex, wherein the extracellular ligand binding domain targets an antigen expressed by cells of a target tumor or cancer selected from a ligand of the NKG2D receptor, CD19, CD70, and BCMA, the immune cells are genetically edited within a target sequence in a target gene selected from ADAM17, HIF-1a, DGKz, GSK-3B, LAG3, TIM3, TRIM29, IL-1R8, CD38, FBP-1, INSIG1, MED12, MED13, CCNC, CDK8, ID3, SOX4, and any combination thereof, the edit yields reduced expression and/or function of the protein encoded by the target gene, as compared to an immune cell not edited within the target sequence in the target gene, the immune cells are edited within an additional target sequence in a target gene to yield reduced levels of expression of the protein encoded by the target gene, as compared to an immune cell not edited within the additional target sequence, and the edit(s) to the target gene(s) are made using a Crispr/Cas system.

[0049] In several embodiments, the genetically engineered and gene edited immune cells provided for herein exhibit enhanced expansion capability, enhanced cytotoxicity against target tumor cells, enhanced persistence, or any combination thereof, as compared to immune cells that do not comprise the edit(s).

[0050] In several embodiments, there is provided a method of manufacturing a population of genetically edited immune cells comprising contacting the population of immune cells with a targeted endonuclease that edits within a target sequence in a target gene selected from ADAM17, HIF-1a, DGKz, GSK-3B, LAG3, TIM3, TRIM29, IL-1R8, CD38, FBP-1, INSIG1, MED12, MED13, CCNC, CDK8, ID3, SOX4, CISH, CBLB, and any combination thereof, wherein the genetically edited immune cells exhibit: enhanced expansion capability, enhanced cytotoxicity against target tumor cells, enhanced persistence, or any combination thereof, as compared to immune cells that have not been edited within the target sequence in the target gene.

[0051] In several embodiments, there is provided a method of manufacturing a population of genetically edited immune cells comprising contacting the population of immune cells with a RNA guided endonuclease that edits within a target sequence in a target gene selected from ADAM17, HIF-la, DGKz, GSK-3B, LAG3, TIM3, TRIM29, IL-1R8, CD38, FBP-1, INSIG1, MED12, MED13, CCNC, CDK8, ID3, SOX4, and any combination thereof, wherein the genetically edited immune cells exhibit: enhanced expansion capability, enhanced cytotoxicity against target tumor cells, enhanced persistence, or any combination thereof, as compared to immune cells that have not been edited within the target sequence in the target gene.

[0052] In several embodiments, there is provided a method of manufacturing a population of genetically edited immune cells comprising contacting the population of immune cells with a Cas-gRNA ribonucleoprotein complex (RNP), wherein: the RNP edits within a target sequence in a target gene selected from ADAM17, HIF-1a, DGKz, GSK-3B, LAG3, TIM3, TRIM29, IL-1R8, CD38, FBP-1, INSIG1, MED12, MED13, CCNC, CDK8, ID3, SOX4, and any combination thereof, the Cas of the RNP comprises Cas9, CasX, CasY. or a combination thereof, and the genetically edited immune cells exhibit: enhanced expansion capability, enhanced cytotoxicity against target tumor cells, enhanced persistence, or any combination thereof, as compared to immune cells that have not been edited within the target sequence in the target gene.

[0053] In some embodiments, the gene is ADAM17. In some embodiments, the gene is HIF-la. In some embodiments, the gene is DGKz. In some embodiments, the gene is GSK-3B. In some embodiments, the gene is LAG3. In some embodiments, the gene is TIM3. In some embodiments, the gene is TRIM29. In some embodiments, the gene is IL-1R8. In some embodiments, the gene is CD38. In some embodiments, the gene is FBP-1. In some embodiments, the gene is INSIG1. In some embodiments, the gene is MED12. In some embodiments, the gene is MED13. In some embodiments, the gene is CCNC. In some embodiments, the gene is CDK8. In some embodiments, the gene is ID3. In some embodiments, the gene is SOX4.

[0054] In several embodiments, there is provided a method of manufacturing a population of genetically edited immune cells comprising: (a) contacting the population of immune cells with a first RNA guided endonuclease, wherein the RNA guided endonuclease edits within a target sequence in a target gene selected from ADAM17, HIF-1a, DGKz, GSK-3B, LAG3, TIM3, TRIM29, IL-1R8, CD38, FBP-1, INSIG1, MED12, MED13, CCNC, CDK8, ID3, SOX4, and any combination thereof; and(b) contacting the population of immune cells with a second RNA guided endonuclease, wherein the second RNA guided endonuclease edits within a target sequence in the CISH gene to yield reduced levels of expression of the CIS protein encoded by the CISH gene, as compared to an immune cell not edited within the target sequence in the CISH gene, wherein the genetically edited immune cells exhibit: enhanced expansion capability, enhanced cytotoxicity against target tumor cells, enhanced persistence, or any combination thereof, as compared to immune cells that have not been edited within the target sequences in the target gene and the CISH gene.

[0055] In several embodiments, there is provided a method of manufacturing a population of genetically edited immune cells comprising (a) contacting the population of immune cells with a first Cas-gRNA ribonucleoprotein (RNP) complex, wherein the RNP complex edits within a target sequence in a target gene selected from ADAM17, HIF-1a, DGKz, GSK-3B, LAG3, TIM3, TRIM29, IL-1R8, CD38, FBP-1, INSIG1, MED12, MED13, CCNC, CDK8, ID3, SOX4, or any combination thereof, and wherein the Cas of the first RNP complex comprises Cas9, CasX, CasY, or combinations thereof; and (b) contacting the population of immune cells with a second Cas-gRNA RNP complex, wherein the second RNP complex edits within a target sequence in the CISH gene to yield reduced levels of expression of the CIS protein encoded by the CISH gene, as compared to an immune cell not edited within the target sequence in the CISH gene, and wherein the Cas of the second RNP complex comprises Cas9, CasX, CasY, or combinations thereof, wherein the genetically edited immune cells exhibit: enhanced expansion capability, enhanced cytotoxicity against target tumor cells, enhanced persistence, or any combination thereof, as compared to immune cells that have not been edited within the target sequence in the target gene and the CISH gene.

[0056] In several embodiments, there is provided a method of manufacturing a population of genetically edited immune cells, comprising (a) contacting the population of immune cells with a first Cas-gRNA ribonucleoprotein (RNPP) complex, wherein the RNP edits within a target sequence in a target gene selected from ADAM17, HIF-1a, DGKz, GSK-3B, LAG3, TIM3, TRIM29, IL-1R8, CD38, FBP-1, INSIG1, MED12, MED13, CCNC, CDK8, ID3, SOX4, or any combination thereof, and wherein the Cas of the first RNP complex comprises Cas9, CasX, CasY, or combinations thereof; and (b) contacting the population of immune cells with a second Cas-gRNA RNP complex, wherein the second RNP complex edits within a target sequence in the CBLB gene to yield reduced levels of expression of the CBLB protein encoded by the CBLB gene, as compared to an immune cell not edited within the location in the CBLB gene, and wherein the Cas of the second RNP complex comprises Cas9, CasX, CasY, or combinations thereof, wherein the genetically edited immune cells exhibit: enhanced expansion capability, enhanced cytotoxicity against target tumor cells, enhanced persistence, or any combination thereof, as compared to immune cells that have not been edited within the target sequences in the target gene and the CBLB gene.

[0057] In several embodiments, there is provided a method of manufacturing a population of genetically edited immune cells, comprising (a) contacting the population of immune cells with a first RNA-guided endonuclease, wherein the first endonuclease edits within a target sequence in a target gene selected from ADAM17, HIF-1a, DGKz, GSK-3B, LAG3, TIM3, TRIM29, IL-1R8, CD38, FBP-1, INSIG1, MED12, MED13, CCNC, CDK8, ID3, SOX4, or any combination thereof; (b) contacting the population of immune cells with a second RNA-guided endonuclease, wherein the second RNA-guided endonuclease edits within a target sequence in the CISH gene to yield reduced levels of expression of the CIS protein encoded by the CISH gene, as compared to an immune cell not edited within the target sequence in the CISH gene; and (c) contacting the population of immune cells with a second RNA-guided endonuclease, wherein the third RNA-guided endonuclease edits within a target sequence in the CBLB gene to yield reduced levels of expression of the CBLB protein encoded by the CBLB gene, as compared to an immune cell not edited within the target sequence in the CBLB gene, wherein the genetically edited immune cells exhibit: enhanced expansion capability, enhanced cytotoxicity against target tumor cells, enhanced persistence, or any combination thereof, as compared to immune cells that have not been edited within the target sequences in the target, CISH, and CBLB genes.

[0058] In several embodiments, there is provided a method of manufacturing a population of genetically edited immune cells, comprising (a) contacting the population of immune cells with a first Cas-gRNA ribonucleoprotein (RNP) complex, wherein the first RNP complex edits within a target sequence in a target gene selected from ADAM17, HIF-1a, DGKz, GSK-3B, LAG3, TIM3, TRIM29, IL-1R8, CD38, FBP-1, INSIG1, MED12, MED13, CCNC, CDK8, ID3, SOX4, or any combination thereof; (b) contacting the population of immune cells with a second RNP complex, wherein the second RNP complex edits within a target sequence in the CISH gene to yield reduced levels of expression of the CIS protein encoded by the CISH gene, as compared to an immune cell not edited within the target sequence in the CISH gene; and (c) contacting the population of immune cells with a third RNP complex, wherein the third RNP complex edits within a target sequence in the CBLB gene to yield reduced levels of expression of the CBLB protein encoded by the CBLB gene, as compared to an immune cell not edited within the target sequence in the CBLB gene, wherein the Cas of each of the first, second, and third RNP complexes comprises Cas9, CasX, CasY, or combinations thereof, and wherein the genetically edited immune cells exhibit: enhanced expansion capability, enhanced cytotoxicity against target tumor cells, enhanced persistence, or any combination thereof, as compared to immune cells that have not been edited within the target sequences in the target, CISH, and CBLB genes.

[0059] In several embodiments, there is provided a method of manufacturing a population of genetically edited immune cells comprising (a) contacting the population of immune cells with a first Cas-gRNA ribonucleoprotein (RNP) complex, wherein the RNP complex edits within a target sequence in the MED12 gene; and (b) contacting the population of immune cells with a second Cas-gRNA RNP complex, wherein the second RNP complex edits within a target sequence in the CISH gene.

[0060] In several embodiments, there is provided a method of manufacturing a population of genetically edited immune cells, comprising contacting the population of immune cells with a plurality of Cas-gRNA ribonucleoprotein (RNP) complexes, wherein the plurality of RNP edits within a target sequence in the CISH gene to yield reduced levels of expression of the CIS protein encoded by the CISH gene, as compared to an immune cell not edited within the target sequence in the CISH gene, the plurality of RNP complexes edits within a target sequence in the CBLB gene to yield reduced levels of expression of CBLB protein encoded by the CBLB gene, as compared to an immune cell not edited within the target sequence in the CBLB gene, the plurality of RNP complexes induce edits within a target sequence in a target gene selected from ADAM17, HIF-1a, DGKz, GSK-3B, LAG3, TIM3, TRIM29, IL-1R8, CD38, FBP-1, INSIG1, MED12, MED13, CCNC, CDK8, ID3, SOX4, or any combination thereof, wherein the Cas of each of the plurality of RNP complexes comprises Cas9, CasX, CasY, or combinations thereof, and wherein the genetically edited immune cells exhibit: enhanced expansion capability, enhanced cytotoxicity against target tumor cells, enhanced persistence, or any combination thereof, as compared to immune cells that have not been edited within the target sequences in the CISH, CBLB, and target genes.

[0061] In some embodiments, the gene is ADAM17. In some embodiments, the gene is HIF-la. In some embodiments, the gene is DGKz. In some embodiments, the gene is GSK-3B. In some embodiments, the gene is LAG3. In some embodiments, the gene is TIM3. In some embodiments, the gene is TRIM29. In some embodiments, the gene is IL-1R8. In some embodiments, the gene is CD38. In some embodiments, the gene is FBP-1. In some embodiments, the gene is INSIG1. In some embodiments, the gene is MED12. In some embodiments, the gene is MED13. In some embodiments, the gene is CCNC. In some embodiments, the gene is CDK8. In some embodiments, the gene is ID3. In some embodiments, the gene is SOX4.

[0062] In several embodiments, the manufacturing methods further comprise contacting the population of immune cells with a vector comprising a polynucleotide encoding a cytotoxic receptor comprising an extracellular ligand binding domain, a transmembrane domain, and a cytotoxic signaling complex.

[0063] In several embodiments, the immune cells are genetically edited within a target sequence in the ADAM17 gene, and the target sequence comprises any of SEQ TD NO: 682-687. In several embodiments, the immune cells are genetically edited within a target sequence in the HIF-1a gene, and the target sequence comprises any of SEQ ID NO: 750-760. In several embodiments, the immune cells are genetically edited within a target sequence in the DGKz gene, and the target sequence comprises any of SEQ ID NO: 688-723. In several embodiments, the immune cells are genetically edited within a target sequence in the GSK-3B gene, and the target sequence comprises any of SEQ ID NO: 724-749. In several embodiments, the immune cells are genetically edited within a target sequence in the LAG3 gene, and the target sequence comprises any of SEQ ID NO: 761-789. In several embodiments, the immune cells are genetically edited within a target sequence in the TIM3 gene, and the target sequence comprises any of SEQ ID NO: 790-825. In several embodiments, the immune cells are genetically edited within a target sequence in the TRIM29 gene, and the target sequence comprises any of SEQ ID NO: 826-835. In several embodiments, the immune cells are genetically edited within a target sequence in the IL-1R8 gene, and the target sequence comprises any of SEQ ID NO: 836-865. In several embodiments, the immune cells are genetically edited within a target sequence in the CD38 gene, and the target sequence comprises any of SEQ ID NO: 866-874. In several embodiments, the immune cells are genetically edited within a target sequence in the FBP-1 gene, and wherein the target sequence comprises any of SEQ ID NO: 875-889. In several embodiments, the immune cells are genetically edited within a target sequence in the INSIG1 gene, and the target sequence comprises any of SEQ ID NO: 890-934. In several embodiments, the immune cells are genetically edited within a target sequence in the MED12 gene, wherein the target sequence comprises any of SEQ ID NO: 938-944. In several embodiments, the immune cells are genetically edited within a target sequence in the MED12 gene, and a target sequence comprising any of SEQ ID NO: 938-944 is used to target the MED12 gene, and optionally wherein the immune cells are genetically edited within a target sequence in the MED13 gene, and the target sequence comprises any of SEQ ID NO: 945-948. In several embodiments, the immune cells are genetically edited within a target sequence in the MED13 gene, wherein the target sequence comprises any of SEQ ID NO: 945-948. In several embodiments, the immune cells are genetically edited within a target sequence in the CDK8 gene, and the target sequence comprises any of SEQ ID NO: 949-955. In several embodiments, the immune cells are genetically edited within a target sequence in the CCNC gene, and the target sequence comprises any of SEQ ID NO: 956-962. In several embodiments, the immune cells are genetically edited within a target sequence in the ID3 gene, and the target sequence comprises any of SEQ ID NO: 963-969. In several embodiments, the immune cells are genetically edited within a target sequence in the SOX4 gene, and the target sequence comprises any of SEQ ID NO: 970-976. In several embodiments, the immune cells are genetically edited within a target sequence in the CISH gene, and the target sequence comprises any of SEQ ID NO: 153-157 or 463-466. In several embodiments, the immune cells are genetically edited within a target sequence in the CBLB gene, and the target sequence comprises any of SEQ ID NO: 164 to 166 or 453-456. In several embodiments, the cells are genetically edited within a target sequence in the MED12 gene. In several embodiments, the target sequence in the MED12 gene comprises any of SEQ ID NOS:996-998. In several embodiments, the cells are genetically edited within a target sequence in the CCNC gene. In several embodiments, the target sequence in the CCNC gene comprises any of SEQ ID NOS:999-1001. In several embodiments, the cells are genetically edited within a target sequence in the SOCS2 gene. In several embodiments, the target sequence in the SOCS2 gene comprises any of SEQ ID NOS:1002-1004. In several embodiments, the cells are genetically edited within a target sequence in the CISH gene. In several embodiments, the target sequence in the CISH gene comprises any of SEQ ID NOS:1012-1013. In several embodiments, the cells are genetically edited within a target sequence in the CBLB gene. In several embodiments, the target sequence in the CBLB gene comprises any of SEQ ID NOS: 1005-1008. In several embodiments, the cells are genetically edited within a target sequence in the TRIM29 gene. In several embodiments, the target sequence in the TRIM29 gene comprises any of SEQ ID NOS:1009-1011. In several embodiments, the cells are genetically edited within a target sequence in the CD70 gene. In several embodiments, the cells are genetically edited within a target sequence in the TGFBR2 gene, the TIGIT gene, the adenosine A2a receptor (ADORA2A) gene, the SMAD3 gene, the MAPKAPK3 gene, the CEACAM1 gene, the DDIT4 gene, then NKG2A gene, the SOCS2 gene, the B2M gene, the PDCD1gene, and/or the TRAC gene.

[0064] In several embodiments, at least a portion of the genetically engineered immune cells are engineered to express interleukin-15 (IL15). In some embodiments, IL15 is a membrane-bound IL15 (mbIL15). In several embodiments, at least a portion of the genetically engineered immune cells are engineered to express membrane bound IL-15 (mbIL15). the cytotoxic receptor and the mbIL15 are encoded by the same nucleic acid molecule. In several embodiments, the nucleic acid sequences encoding the cytotoxic receptor and the mbIL15 are separated by a nucleic acid sequence encoding a 2A peptide.

[0065] In several embodiments, the cells are edited within target sequences in the CISH, CBLB, and ADAM17 genes.

[0066] In several embodiments, the cells are edited within target sequences in the CISH, CBLB, and HIF1a genes.

[0067] In several embodiments, the cells are edited within target sequences in the CISH, CBLB, and FBP-1 genes.

[0068] In several embodiments, the cells are edited within target sequences in the CISH, CBLB, and/or MED12 genes. In several embodiments, the cells are edited within target sequences in the CISH and MED12 genes. In several embodiments, the cells are edited within target sequences in the CBLB and MED12 genes. In several embodiments, the cells are edited within target sequences in the CISH, CBLB, and MED12 genes.

[0069] In several embodiments, the cells are also edited within a target sequence in the CD70 gene, and wherein the method further comprises contacting the population of immune cells with a vector comprising a polynucleotide encoding a cytotoxic receptor comprising an extracellular ligand binding domain that targets CD70, a transmembrane domain, and a cytotoxic signaling complex.

[0070] In several embodiments, the methods do not comprise editing the CD70 gene. In several embodiments, the methods do not comprise editing the CD70 gene and the immune cells express their normal endogenous amount of CD70. In several embodiments, the cells are not edited within a target sequence in the CD70 gene.

[0071] In several embodiments, the cytotoxic receptor binds to BCMA, CD19, CD70, a NKG2D ligand, CD38, GPRC5D, CD138 DLL3, EGFR, PSMA, FLT3, KREMEN2, or a combination thereof. In some embodiments, the cytotoxic receptor binds to BCMA. In some embodiments, the cytotoxic receptor binds to CD19. In some embodiments, the cytotoxic receptor binds to CD70. In some embodiments, the cytotoxic receptor binds to NKG2D ligand. In some embodiments, the cytotoxic receptor binds to CD38. In some embodiments, the cytotoxic receptor binds to GPRC5D. In some embodiments, the cytotoxic receptor binds to CD138. In some embodiments, the cytotoxic receptor binds to GPRC5D. In some embodiments, the cytotoxic receptor binds to DLL3. In some embodiments, the cytotoxic receptor binds to EGFR. In some embodiments, the cytotoxic receptor binds to PSMA. In some embodiments, the cytotoxic receptor binds to FLT3. In some embodiments, the cytotoxic receptor binds to KREMEN2.

[0072] In several embodiments, the cytotoxic receptor does not target CD19.

[0073] In several embodiments, the cytotoxic receptor does not target NKG2D ligands.

[0074] In several embodiments, the immune cells comprise Natural Killer (NK) cells, T cells, induced pluripotent stem cells (iPSCs), iPSC-derived NK cells, iPSC-derived T cells, NK-92 cells, or combinations thereof. In several embodiments, the immune cells comprise Natural Killer (NK) cells. In several embodiments, the immune cells comprise T cells. In several embodiments, the immune cells comprise Natural Killer (NK) cells and T cells.

[0075] In several embodiments, the immune cells comprise a mixture of NK cells and T cells or a mixture of iPSC-derived NK cells and T cells. In several embodiments, the immune cells comprise a mixture of iPSC-derived NK cells and/or iPSC-derived T cells.

[0076] Also provided for herein is a method for treating cancer in a subject comprising, administering to the subject a population of genetically engineered immune cells as provided for herein. In some embodiments, cells of the cancer express the antigen bound by the cytotoxic receptor.

[0077] In several embodiments, the immune cells are allogeneic with respect the subject. In some embodiments, the immune cells are obtained from a donor that does not have cancer.

[0078] In several embodiments, the treatment methods or uses provided for herein further comprise administering IL2.

[0079] In several embodiments, the transmembrane domain of the expressed cytotoxic receptor comprises CD8, CD28, or a portion thereof, optionally wherein the transmembrane domain comprises CD8 alpha or a portion thereof. In several embodiments, the transmembrane domain of the expressed cytotoxic receptor comprises CD8. In several embodiments, the transmembrane domain of the expressed cytotoxic receptor comprises CD8 alpha. In several embodiments, the cytotoxic signaling complex of the expressed cytotoxic receptor comprises a CD3zeta domain and an intracellular signaling domain. In several embodiments, the cytotoxic signaling complex of the expressed cytotoxic receptor comprises a CD3zeta domain and an intracellular signaling domain of an OX40, 4-1BB, CD28, or a signaling portion thereof, optionally an intracellular signaling domain of OX40 or a signaling portion thereof. In several embodiments, the cytotoxic signaling complex of the expressed cytotoxic receptor comprises a CD3zeta domain and an intracellular signaling domain of an OX40. In several embodiments, at least a portion of the genetically engineered immune cells are engineered to express interleukin-15 (IL15). In some embodiments, IL15 is a membrane-bound IL15 (mbIL15). In several embodiments, at least a portion of the genetically engineered immune cells are engineered to express membrane bound IL-15 (mbIL15).

[0080] In several embodiments, provided for herein is a composition comprising the population of genetically engineered and gene edited immune cells as provided for herein. In several embodiments, provided for herein is a composition comprising the population of gene edited immune cells as provided for herein. In several embodiments, provided for herein is a composition comprising the population of genetically engineered and gene edited immune cells as provided for herein and a pharmaceutically acceptable excipient. In several embodiments, provided for herein is a composition comprising the population of gene edited immune cells as provided for herein and a pharmaceutically acceptable excipient.

[0081] Also provided for herein are methods for the treatment of a subject having a disease or condition comprising administering to the subject the population of genetically engineered and gene edited immune cells or compositions as disclosed herein. Also provided for is the use a population of genetically engineered and gene edited immune cells or a composition as disclosed herein for the treatment of a subject having a disease or condition. Also provided for is the use a population of genetically engineered and gene edited immune cells or a composition as disclosed herein for the preparation of a medicament for the treatment of a subject having a disease or condition. Also provided for herein are methods for the treatment of a subject having a disease or condition comprising administering to the subject the population of gene edited immune cells or compositions as disclosed herein. Also provided for is the use a population of gene edited immune cells or a composition as disclosed herein for the treatment of a subject having a disease or condition. Also provided for is the use a population of gene edited immune cells or a composition as disclosed herein for the preparation of a medicament for the treatment of a subject having a disease or condition.

[0082] In several embodiments, the disease or condition is an infectious disease, an autoimmune disease, a cancer, or a tumor. In several embodiments, the disease or condition is a cancer. In several embodiments, the disease or condition is a NKG2D ligand-expressing cancer In several embodiments, the disease or condition is a CD19-expressing cancer. In several embodiments, the disease or condition is a CD70-expressing cancer. In several embodiments, the disease or condition is a BCMA-expressing cancer. In several embodiments, the immune cells comprise natural killer (NK) cells. In several embodiments, the immune cells are allogeneic to the subject.

[0083] Provided herein is a population of gene edited immune cells that are genetically edited within a target sequence in the gene encoding a disintegrin and metalloproteinase domain-containing protein 17 (ADAM17) protein, wherein the edit yields reduced expression and/or function of the ADAM17 protein as compared to an immune cell not edited within the target sequence in the ADAM17 gene. In some embodiments, the gene edited immune cells are genetically engineered to express a cytotoxic receptor comprising an extracellular ligand binding domain, a transmembrane domain, and a cytotoxic signaling complex. In some embodiments, the extracellular ligand binding domain binds an antigen expressed by cells of a cancer or a tumor.

[0084] Also provided herein is a population of genetically engineered and gene edited immune cells, comprising genetically engineered immune cells that express a cytotoxic receptor comprising an extracellular ligand binding domain, a transmembrane domain, and a cytotoxic signaling complex, wherein the extracellular ligand binding domain targets a tumor marker expressed by a target tumor cell, wherein the immune cells are genetically edited within a target sequence in the ADAM17 gene, and wherein the edits yield reduced expression and/or function of the ADAM17 protein as compared to an immune cell not edited within the target sequence in the ADAM17 gene. In several embodiments, the immune cells are edited within an additional target sequence in the genome of the immune cell to yield reduced levels of expression of a protein that is encoded by a gene comprising the edit within the additional target sequence, compared to a non-edited immune cell. In several embodiments, the protein that is encoded by a gene comprising the edit within the additional target sequence is ADAM17. In several embodiments, the protein that is encoded by a gene comprising the edit within the additional target sequence is not ADAM17. In some embodiments, the edit to the ADAM17 gene is made using a RNA-guided endonuclease. In some embodiments, the edit to the additional location is made using a RNA-guided endonuclease. In several embodiments, the genetically engineered and edited immune cells exhibit one or more of enhanced expansion capability, enhanced cytotoxicity against target tumor cells, and enhanced persistence, as compared to immune cells that do not comprise a genetically edited location.

[0085] In several embodiments, there is provided a population of genetically engineered and gene edited immune cells, comprising genetically engineered immune cells that express a cytotoxic receptor comprising an extracellular ligand binding domain, a transmembrane domain, and a cytotoxic signaling complex, wherein the extracellular ligand binding domain targets a tumor marker expressed by a target tumor cell, wherein the immune cells are genetically edited at one or more locations in an ADAM17 target gene that encodes a corresponding protein, wherein the edits yield reduced expression and/or function of a corresponding ADAM17 protein as compared to an immune cell not edited at the location or locations in the ADAM17 gene, wherein the immune cells are optionally edited at one or more additional target sites in the genome of the immune cell to yield reduced levels of expression of the protein which is encoded by a gene which comprises an edited target site as compared to a non-edited immune cell, wherein the edits to the target gene or target genes are made using an RNA-guided endonuclease, and wherein the genetically engineered and edited immune cells exhibit one or more of enhanced expansion capability, enhanced cytotoxicity against target tumor cells, and enhanced persistence, as compared to immune cells that do not comprise said genetically edited target site or sites.

[0086] Provided herein is a population of gene edited immune cells that are genetically edited within a target sequence in the gene encoding a mediator of RNA polymerase II transcription subunit 12 (MED12) protein, wherein the edit yield reduced expression and/or function of the MED12 protein as compared to an immune cell not edited within the target sequence in the MED12 gene. In some embodiments, the gene edited immune cells are genetically engineered to express a cytotoxic receptor comprising an extracellular ligand binding domain, a transmembrane domain, and a cytotoxic signaling complex. In some embodiments, the extracellular ligand binding domain binds an antigen expressed by cells of a cancer or a tumor.

[0087] Also provided herein is a population of genetically engineered and gene edited immune cells, comprising genetically engineered immune cells that express a cytotoxic receptor comprising an extracellular ligand binding domain, a transmembrane domain, and a cytotoxic signaling complex, wherein the extracellular ligand binding domain targets a tumor marker expressed by a target tumor cell, wherein the immune cells are genetically edited within a target sequence in the MED12 gene. Also provided herein is a population of genetically engineered and gene edited immune cells, comprising genetically engineered immune cells that express a cytotoxic receptor comprising an extracellular ligand binding domain, a transmembrane domain, and a cytotoxic signaling complex, wherein the extracellular ligand binding domain targets a tumor marker expressed by a target tumor cell, wherein the immune cells are genetically edited within a target sequence in the MED12 gene, and wherein the edits yield reduced expression and/or function of the MED12 protein as compared to an immune cell not edited within the target sequence in the MED12 gene. In several embodiments, the immune cells are edited within an additional target sequence in the genome of the immune cell to yield reduced levels of expression of a protein that is encoded by a gene comprising the edit within the additional target sequence, compared to a non-edited immune cell. In several embodiments, the protein that is encoded by a gene comprising the edit within the additional target sequence is MED12. In several embodiments, the protein that is encoded by a gene comprising the edit within the additional target sequence is not MED12. In some embodiments, the edit to the MED12 gene is made using a RNA-guided endonuclease. In some embodiments, the edit to the additional location is made using a RNA-guided endonuclease. In several embodiments, the genetically engineered and edited immune cells exhibit one or more of enhanced expansion capability, enhanced cytotoxicity against target tumor cells, and enhanced persistence, as compared to immune cells that do not comprise a genetically edited location.

[0088] In several embodiments, there is provided a population of genetically engineered and gene edited immune cells, comprising genetically engineered immune cells that express a cytotoxic receptor comprising an extracellular ligand binding domain, a transmembrane domain, and a cytotoxic signaling complex, wherein the extracellular ligand binding domain targets a tumor marker expressed by a target tumor cell, wherein the immune cells are genetically edited at one or more locations in a MED12 target gene that encodes a corresponding protein, wherein the edits yield reduced expression and/or function of a corresponding MED12 protein as compared to an immune cell not edited at the location or locations in the MED12 gene, wherein the immune cells are optionally edited at one or more additional target sites in the genome of the immune cell to yield reduced levels of expression of the protein which is encoded by a gene which comprises an edited target site as compared to a non-edited immune cell, wherein the edits to the target gene or target genes are made using an RNA-guided endonuclease, and wherein the genetically engineered and edited immune cells exhibit one or more of enhanced expansion capability, enhanced cytotoxicity against target tumor cells, and enhanced persistence, as compared to immune cells that do not comprise said genetically edited target site or sites.

[0089] Provided herein is a population of gene edited immune cells that are genetically edited within a target sequence in the gene encoding a hypoxia-inducible factor 1-alpha (HIF1-a) protein, wherein the edit yield reduced expression and/or function of the HIF1-a protein as compared to an immune cell not edited within the target sequence in the HIF1A gene. In some embodiments, the gene edited immune cells are genetically engineered to express a cytotoxic receptor comprising an extracellular ligand binding domain, a transmembrane domain, and a cytotoxic signaling complex. In some embodiments, the extracellular ligand binding domain binds an antigen expressed by cells of a cancer or a tumor.

[0090] In several embodiments, there is provided a population of genetically engineered and gene edited immune cells, comprising, genetically engineered immune cells that express a cytotoxic receptor comprising an extracellular ligand binding domain, a transmembrane domain, and a cytotoxic signaling complex, wherein the extracellular ligand binding domain targets a tumor marker expressed by a target tumor cell, wherein the immune cells are genetically edited at one or more locations in an HIF1-a target gene that encodes a corresponding HIF1-a protein, wherein the edits yield reduced expression and/or function of the corresponding HIF1-a protein as compared to an immune cell not edited at the location or locations in the HIF1-a gene, wherein the immune cells are optionally edited at one or more additional target sites in the genome of the immune cell to yield reduced levels of expression of the protein which is encoded by a gene which comprises an edited target site as compared to a non-edited immune cell, wherein the edits to the target gene or target genes are made using an RNA-guided endonuclease, and wherein the genetically engineered and edited immune cells exhibit one or more of enhanced expansion capability, enhanced cytotoxicity against target tumor cells, and enhanced persistence, as compared to immune cells that do not comprise said genetically edited target site or sites.

[0091] In several embodiments, the immune cells are genetically edited within a target sequence within a target gene selected from ADAM17, HIF-1a, DGKz, GSK-3B, LAG3, TIM3, TRIM29, IL-1R8, CD38, FBP-1, INSIG1, MED12, MED 13, CCNC, CDK8, ID3, SOX4, or any combination thereof. In several embodiments, the edit yields reduced expression and/or function of the corresponding protein as compared to an immune cell not edited within target sequence in the target gene. In several embodiments, the edit is made using an RNA-guided endonuclease. In some embodiments, the edit is made using a CRISPR/Cas system. In some embodiments, the Cas is Cas9. In some embodiments, the edit is made using a CRISPR/Cas9 system. In several embodiments, the genetically engineered and edited immune cells exhibit enhanced expansion capability, enhanced cytotoxicity against target tumor cells, enhanced persistence, or any combination thereof, as compared to immune cells that have not been edited within the target sequence(s).

[0092] In several embodiments, there is provided population of genetically engineered and gene edited immune cells, comprising genetically engineered immune cells that express a cytotoxic receptor comprising an extracellular ligand binding domain, a transmembrane domain, and a cytotoxic signaling complex, wherein the extracellular ligand binding domain targets a tumor marker expressed by a target tumor cell, wherein the immune cells are genetically edited at one or more locations in a target gene selected from ADAM17, HIF-1a, DGKz, GSK-3B, LAG3, TIM3, TRIM29, IL-1R8, CD38, FBP-1, INSIG1, MED12, MED 13, CCNC. CDK8, ID3, SOX4, or any combination thereof, wherein each of said genes encodes a corresponding protein, wherein the edits yield reduced expression and/or function of the corresponding protein as compared to an immune cell not edited at the location or locations in the respective gene, wherein the immune cells are edited at one or more additional target sites in the genome of the immune cell to yield reduced levels of expression of the protein which is encoded by a gene which comprises an edited target site as compared to a non-edited immune cell, wherein the edits to the target gene or target genes are made using an RNA-guided endonuclease, and wherein the genetically engineered and edited immune cells exhibit one or more of enhanced expansion capability, enhanced cytotoxicity against target tumor cells, and enhanced persistence, as compared to immune cells that do not comprise said genetically edited target site or sites.

[0093] In several embodiments, there is provided a population of genetically engineered and gene edited immune cells, comprising genetically engineered immune cells that express a cytotoxic receptor comprising an extracellular ligand binding domain, a transmembrane domain, and a cytotoxic signaling complex, wherein the extracellular ligand binding domain targets a tumor marker expressed by a target tumor cell, wherein the immune cells are genetically edited at one or more locations in a target gene selected from ADAM17, HIF-1a, DGKz, GSK-3B, LAG3, TIM3, TRIM29, IL-1R8, CD38, FBP-1, INSIG1, MED12, MED13, CCNC, CDK8, ID3, SOX4, or any combination thereof, wherein each of said genes encodes a corresponding protein, wherein the edits yield reduced expression and/or function of the corresponding protein as compared to an immune cell not edited at the location or locations in the respective gene, wherein the immune cells are edited at one or more additional target sites in the genome of the immune cell to yield reduced levels of expression of the protein which is encoded by a gene which comprises an edited target site as compared to a non-edited immune cell, wherein the edits to the target gene or target genes are made using a Crispr/Cas9 system, and wherein the genetically engineered and edited immune cells exhibit one or more of enhanced expansion capability, enhanced cytotoxicity target tumor cells, and enhanced persistence, as compared to immune cells that do not comprise said genetically edited target site or sites.

[0094] In several embodiments, there is also provided a population of genetically engineered and gene edited immune cells, comprising genetically engineered immune cells that express a cytotoxic receptor comprising an extracellular ligand binding domain, a transmembrane domain, and a cytotoxic signaling complex, wherein the extracellular ligand binding domain targets a tumor marker expressed by a target tumor cell, wherein the tumor marker expressed by the target tumor cell is selected from a ligand of the NKG2D receptor, CD19, or CD70, wherein the immune cells are genetically edited at one or more locations in a target gene selected from ADAM17, HIF-1a, DGKz, GSK-3B, LAG3, TIM3, TRIM29, IL-1R8, CD38, FBP-1, INSIG1, MED12, MED13, CCNC, CDK8, ID3, SOX4, or any combination thereof, wherein each of said genes encodes a corresponding protein, wherein the edits yield reduced expression and/or function of the corresponding protein as compared to an immune cell not edited at the location or locations in the respective gene, wherein the immune cells are edited at one or more additional target sites in the genome of the immune cell to yield reduced levels of expression of the protein which is encoded by a gene which comprises an edited target site as compared to a non-edited immune cell, wherein the edits to the target gene or target genes are made using a Crispr/Cas system or other guided endonuclease, and wherein the genetically engineered and edited immune cells exhibit one or more of enhanced expansion capability, enhanced cytotoxicity against target tumor cells, and enhanced persistence, as compared to immune cells that do not comprise said genetically edited target site or sites.

[0095] In several embodiments, there is provided a method of manufacturing a population of genetically edited immune cells for cancer immunotherapy, comprising, contacting the population of immune cells with a targeted endonuclease, wherein the targeted endonuclease cuts nucleic acid at two or more target sites in a target gene selected from ADAM17, HIF-1a, DGKz, GSK-3B, LAG3, TIM3, TRIM29, IL-1R8, CD38, FBP-1, INSIG1, MED12, MED13, CCNC, CDK8, ID3, SOX4, CISH, CBLB, or any combination thereof, and wherein the genetically edited immune cells exhibit one or more of enhanced expansion capability, enhanced cytotoxicity against target tumor cells, and enhanced persistence, as compared to immune cells that do not comprise said genetically edited target site or sites.

[0096] In several embodiments, there is provided a method of manufacturing a population of genetically edited immune cells for cancer immunotherapy, comprising contacting the population of immune cells with a RNA guided endonuclease, wherein the RNA guided endonuclease edits at one or more target sites in a target gene selected from ADAM17, HIF-1a, DGKz, GSK-3B, LAG3, TIM3, TRIM29, IL-1R8, CD38, FBP-1, INSIG1, MED12, MED13, CCNC, CDK8, TD3, SOX4 or any combination thereof, and wherein the genetically edited immune cells exhibit one or more of enhanced expansion capability, enhanced cytotoxicity against target tumor cells, and enhanced persistence, as compared to immune cells that do not comprise said genetically edited target site or sites.

[0097] In several embodiments, there is provided a method of manufacturing a population of genetically edited immune cells for cancer immunotherapy, comprising contacting the population of immune cells with a Cas-gRNA ribonucleoprotein complex (RNP), wherein the RNP edits at one or more target sites in a target gene selected from ADAM17, HIF-1a, DGKz, GSK-3B, LAG3, TIM3, TRIM29, IL-1R8, CD38, FBP-1, INSIG1, MED12, MED13, CCNC, CDK8, ID3, SOX4 or any combination thereof, wherein the Cas of the RNP comprises Cas9, CasX, CasY, or combinations thereof, and wherein the genetically edited immune cells exhibit one or more of enhanced expansion capability, enhanced cytotoxicity against target tumor cells, and enhanced persistence, as compared to immune cells that do not comprise said genetically edited target site or sites.

[0098] In some embodiments, the gene is ADAM17. In some embodiments, the gene is HIF-la. In some embodiments, the gene is DGKz. In some embodiments, the gene is GSK-3B. In some embodiments, the gene is LAG3. In some embodiments, the gene is TIM3. In some embodiments, the gene is TRIM29. In some embodiments, the gene is IL-1R8. In some embodiments, the gene is CD38. In some embodiments, the gene is FBP-1. In some embodiments, the gene is INSIG1. In some embodiments, the gene is MED12. In some embodiments, the gene is MED13. In some embodiments, the gene is CCNC. In some embodiments, the gene is CDK8. In some embodiments, the gene is ID3. In some embodiments, the gene is SOX4.

[0099] In several embodiments, there is provided a method of manufacturing a population of genetically edited immune cells for cancer immunotherapy, comprising contacting the population of immune cells with a first RNA guided endonuclease, wherein the endonuclease edits at one or more target sites in a target gene selected from ADAM17, HIF-1a, DGKz, GSK-3B, LAG3, TIM3, TRIM29, IL-1R8, CD38, FBP-1, INSIG1, MED12, MED13, CCNC, CDK8, ID3, SOX4, or any combination thereof; and contacting the population of immune cells with a second RNA guided endonuclease, wherein the second endonuclease edits at one or more target sites in a in a CISH gene of the immune cell to yield reduced levels of expression of CIS protein encoded by the CISH gene as compared to an immune cell not edited at the CISH gene, and wherein the genetically edited immune cells exhibit one or more of enhanced expansion capability, enhanced cytotoxicity against target tumor cells, and enhanced persistence, as compared to immune cells that do not comprise said genetically edited target site or sites.

[0100] In several embodiments, there is provided a method of manufacturing a population of genetically edited immune cells for cancer immunotherapy, comprising contacting the population of immune cells with a first Cas-gRNA ribonucleoprotein complex (RNP), wherein the RNP edits at one or more target sites wherein the RNP edits at one or more target sites in a target gene selected from ADAM17, HIF-1 a, DGKz, GSK-3B, LAG3, TIM3, TRIM29, IL-1 R8, CD38, FBP-1, INSIG1, MEDI 2, MED13, CCNC, CDK8, ID3, SOX4, or any combination thereof, wherein the Cas of the RNP comprises Cas9, CasX, CasY, or combinations thereof, and contacting the population of immune cells with a second RNP complex, wherein the second RNP edits at one or more target sites in a in a CISH gene of the immune cell to yield reduced levels of expression of CIS protein encoded by the CISH gene as compared to an immune cell not edited at the CISH gene, wherein the Cas of the RNP comprises Cas9, CasX, CasY, or combinations thereof, and wherein the genetically edited immune cells exhibit one or more of enhanced expansion capability, enhanced cytotoxicity against target tumor cells, and enhanced persistence, as compared to immune cells that do not comprise said genetically edited target site or sites.

[0101] In several embodiments, there is provided a method of manufacturing a population of genetically edited immune cells for cancer immunotherapy, comprising contacting the population of immune cells with a first Cas-gRNA ribonucleoprotein complex (RNP), wherein the RNP edits at one or more target sites wherein the RNP edits at one or more target sites in a target gene selected from ADAM17, HIF-1a, DGKz, GSK-3B, LAG3, TIM3, TRIM29, IL-1R8, CD38, FBP-1, INSIG1, MED12, MED13, CCNC, CDK8, ID3, SOX4, or any combination thereof, wherein the Cas of the RNP comprises Cas9, CasX, CasY, or combinations thereof, and contacting the population of immune cells with a second RNP complex, wherein the second RNP edits at one or more target sites in a in a CBLB gene of the immune cell to yield reduced levels of expression of CBLB protein encoded by the CBLB gene as compared to an immune cell not edited at the CBLB gene, wherein the Cas of the RNP comprises Cas9, CasX, CasY, or combinations thereof, and wherein the genetically edited immune cells exhibit one or more of enhanced expansion capability, enhanced cytotoxicity against target tumor cells, and enhanced persistence, as compared to immune cells that do not comprise said genetically edited target site or sites.

[0102] In several embodiments, there is provided a method of manufacturing a population of genetically edited immune cells for cancer immunotherapy, comprising contacting the population of immune cells with a first RNA-guided endonuclease, wherein the first endonuclease edits at one or more target sites wherein the RNP edits at one or more target sites in a target gene selected from ADAM17, HIF-1a, DGKz, GSK-3B, LAG3, TIM3, TRIM29, IL-1R8, CD38, FBP-1, INSIG1, MED12, MED13, CCNC, CDK8, ID3, SOX4, or any combination thereof, and contacting the population of immune cells with a second and a third RNA-guided endonuclease, wherein the second RNA-guided endonuclease edits at one or more target sites in a in a CISH gene of the immune cell to yield reduced levels of expression of CIS protein encoded by the CISH gene as compared to an immune cell not edited at the CISH gene, wherein the third RNA-guided endonuclease edits at one or more target sites in CBLB gene of the immune cell to yield reduced levels of expression of CBLB protein encoded by the CBLB gene as compared to an immune cell not edited at the CBLB gene, and wherein the genetically edited immune cells exhibit one or more of enhanced expansion capability, enhanced cytotoxicity against target tumor cells, and enhanced persistence, as compared to immune cells that do not comprise said genetically edited target site or sites.

[0103] In several embodiments, there is provided a method of manufacturing a population of genetically edited immune cells for cancer immunotherapy, comprising contacting the population of immune cells with a first Cas-gRNA ribonucleoprotein complex (RNP), wherein the RNP edits at one or more target sites wherein the RNP edits at one or more target sites in a target gene selected from ADAM17, HIF-1a, DGKz, GSK-3B, LAG3, TIM3, TRIM29, IL-1R8, CD38, FBP-1, INSIG1, MED12, MED13, CCNC, CDK8, ID3, SOX4, or any combination thereof, and contacting the population of immune cells with a second and a third RNP complex, wherein the second RNP edits at one or more target sites in a in a CISH gene of the immune cell to yield reduced levels of expression of CIS protein encoded by the CISH gene as compared to an immune cell not edited at the CISH gene, wherein the third RNP edits at one or more target sites in CBLB gene of the immune cell to yield reduced levels of expression of CBLB protein encoded by the CBLB gene as compared to an immune cell not edited at the CBLB gene, wherein the Cas of each of the RNP comprises Cas9, CasX, CasY, or combinations thereof and wherein the genetically edited immune cells exhibit one or more of enhanced expansion capability, enhanced cytotoxicity against target tumor cells, and enhanced persistence, as compared to immune cells that do not comprise said genetically edited target site or sites.

[0104] In several embodiments, there is provided a method of manufacturing a population of genetically edited immune cells for cancer immunotherapy, comprising, contacting the population of immune cells with a plurality of Cas-gRNA ribonucleoprotein complex (RNP), wherein the plurality of RNP induces edits at one or more target sites in a CISH gene of the immune cell to yield reduced levels of expression of CIS protein encoded by the CISH gene as compared to an immune cell not edited at the CISH gene, wherein the plurality of RNP induces edits at one or more target sites in CBLB gene of the immune cell to yield reduced levels of expression of CBLB protein encoded by the CBLB gene as compared to an immune cell not edited at the CBLB gene, wherein the plurality of RNP induces edits at one or more target sites in a target gene selected from ADAM17, HIF-1a, DGKz, GSK-3B, LAG3, TIM3, TRIM29, IL-1R8, CD38, FBP-1, INSIG1, MED12, MED13, CCNC, CDK8, ID3, SOX4, or any combination thereof, wherein the Cas of each of the plurality of RNP comprises Cas9, CasX, CasY, or combinations thereof, and wherein the genetically edited immune cells exhibit one or more of enhanced expansion capability, enhanced cytotoxicity against target tumor cells, and enhanced persistence, as compared to immune cells that do not comprise said genetically edited target site or sites.

[0105] In some embodiments, the gene is ADAM17. In some embodiments, the gene is HIF-la. In some embodiments, the gene is DGKz. In some embodiments, the gene is GSK-3B. In some embodiments, the gene is LAG3. In some embodiments, the gene is TIM3. In some embodiments, the gene is TRIM29. In some embodiments, the gene is IL-1R8. In some embodiments, the gene is CD38. In some embodiments, the gene is FBP-1. In some embodiments, the gene is INSIG1. In some embodiments, the gene is MED12. In some embodiments, the gene is MED13. In some embodiments, the gene is CCNC. In some embodiments, the gene is CDK8. In some embodiments, the gene is TD3. In some embodiments, the gene is SOX4.

[0106] In several embodiments, the methods of production further comprise contacting the population of immune cells with a vector comprising a polynucleotide encoding a cytotoxic receptor comprising an extracellular ligand binding domain, a transmembrane domain, and a cytotoxic signaling complex.

[0107] Also provided herein is a method for treating a subject having a disease or condition comprising, administering to the subject population of gene edited natural killer (NK) cells that are genetically edited within a target sequence in the MED12 gene. In some embodiments, the immune cells are genetically engineered to express a cytotoxic receptor. In some embodiments, the cytotoxic receptor comprises an extracellular ligand binding domain, a transmembrane domain, and a cytotoxic signaling complex. In some embodiments, the extracellular ligand binding domain binds to an antigen expressed by cells of a target tumor or cancer. In some embodiments, the genetic edit within a target sequence in the MED12 gene comprising any one of SEQ ID NOs: 938-994 or 996-998. In some embodiments, the genetic edit to MED12 reduces expression and/or function of the MED12 protein encoded by the MED12 gene, as compared to an immune cell not edited within the target sequence. In several embodiments, the edit to the MED12 gene is made using an RNA-guided endonuclease.

[0108] In some embodiments, provided herein is a method for treating a subject having a disease or condition comprising, administering to the subject population of natural killer (NK) cells that are genetically edited within a target sequence in the MED12 gene. In some embodiments, provided herein is a method for treating a subject having a disease or condition comprising, administering to the subject population of natural killer (NK) cells that are genetically edited within a target sequence in the MED12 gene and a target sequence in the CISH gene. In several embodiments, there is provided a population of genetically edited immune cells comprising immune cells that are genetically edited within a target sequence in the MED12 gene and within a target sequence in the CISH gene. In some embodiments, the immune cells are genetically engineered to express a cytotoxic receptor. In some embodiments, the cytotoxic receptor comprises an extracellular ligand binding domain, a transmembrane domain, and a cytotoxic signaling complex. In some embodiments, the extracellular ligand binding domain binds to an antigen expressed by cells of a target tumor or cancer. In some embodiments, the genetic edit within a target sequence in the MED12 gene reduces expression and/or function of the MED12 protein encoded by the MED12 gene, as compared to an immune cell not edited within the target sequence. In some embodiments, the genetic edit within a target sequence in the CISH gene reduces expression and/or function of the CIS protein encoded by the CIS gene, as compared to an immune cell not edited within the target sequence. In several embodiments, there is provided a population of genetically engineered and gene edited immune cells, comprising genetically engineered immune cells that express a cytotoxic receptor comprising an extracellular ligand binding domain, a transmembrane domain, and a cytotoxic signaling complex, wherein the extracellular ligand binding domain targets an antigen expressed by cells of a target tumor or cancer, the immune cells are genetically edited within a target sequence in the MED12 gene, the edit yields reduced expression and/or function of the mediator complex subunit 12 (MED12) protein encoded by the MED12 gene, as compared to an immune cell not edited within the target sequence in the MED12 gene, and the edit to the MED12 gene is made using an RNA-guided endonuclease. In several embodiments, there is provided a population of genetically engineered and gene edited immune cells, comprising genetically engineered immune cells that express a cytotoxic receptor comprising an extracellular ligand binding domain, a transmembrane domain, and a cytotoxic signaling complex, wherein the extracellular ligand binding domain targets an antigen expressed by cells of a target tumor or cancer, the immune cells are genetically edited within a target sequence in the MED12 gene and within a target sequence in the CISH gene, the edits yield reduced expression and/or function of the mediator complex subunit 12 (MED12) protein and the CIS protein, as compared to an immune cell not edited within the target sequence in the MED12 and CISH genes, and the edits are made using an RNA-guided endonuclease. In several embodiments, the disease or condition is cancer. In several embodiments, the immune cells are allogenic to the subject.

[0109] Also provided herein is a method for treating a disease or condition in a subject comprising, administering to the subject a population of genetically engineered immune cells, wherein the immune cells express a cytotoxic receptor comprising an extracellular ligand binding domain, a transmembrane domain, and a cytotoxic signaling complex, wherein the immune cells are genetically edited within a target sequence in the CISH gene, and wherein the immune cells are edited within a target sequence in a target gene selected from ADAM17, HIF-1a, DGKz, GSK-3B, LAG3, TIM3, TRIM29, IL-1R8, CD38, FBP-1, INSIG1, MED12, MED13, CCNC, CDK8, ID3, SOX4, or any combination thereof. In some embodiments, the disease or condition is an autoimmune disease, an infectious disease, or a cancer. In several embodiments, the disease or condition is cancer. In some embodiments, the disease or condition is an autoimmune disease. In some embodiments, the disease or condition is an infectious disease. In several embodiments, there is provided for herein a method for treating cancer in a subject comprising, administering to the subject a population of genetically engineered immune cells, wherein the immune cells express a cytotoxic receptor comprising an extracellular ligand binding domain, a transmembrane domain, and a cytotoxic signaling complex, wherein the immune cells are genetically edited at one or more target locations in a CISH gene that encodes a CIS protein, wherein the edits yield reduced expression and/or function of CIS as compared to an immune cell not edited at the location or locations in the CISH gene, wherein the immune cells are edited at one or more target locations in one more target genes selected from ADAM17, HIF-1a, DGKz, GSK-3B, LAG3, TIM3, TRIM29, IL-1R8, CD38, FBP-1, INSIG1, MED12, MED13, CCNC, CDK8, ID3, SOX4, or any combination thereof, wherein the edits are made using an RNA-guided endonuclease, and wherein the genetically engineered and edited immune cells exhibit one or more of enhanced expansion capability, enhanced cytotoxicity against target tumor cells, and enhanced persistence, particularly in a hypoxic tumor microenvironment, as compared to immune cells that do not comprise said genetically edited target site or sites.

[0110] Also provided herein a method for treating a disease or condition in a subject comprising, administering to the subject a population of genetically engineered immune cells, wherein the immune cells express a cytotoxic receptor comprising an extracellular ligand binding domain, a transmembrane domain, and a cytotoxic signaling complex, wherein the immune cells are genetically edited within a target sequence in the CISH gene, wherein the immune cells are genetically edited within a target sequence in the CBLB gene, and wherein the immune cells are edited within a target sequence in a target gene selected from ADAM17, HIF-1a, DGKz, GSK-3B, LAG3, TIM3, TRIM29, IL-1R8, CD38, FBP-1, INSIG1, MED12, MED13, CCNC, CDK8, ID3, SOX4, or any combination thereof. In some embodiments, the disease or condition is an autoimmune disease, an infectious disease, or a cancer. In several embodiments, the disease or condition is cancer. In some embodiments, the disease or condition is an autoimmune disease. In some embodiments, the disease or condition is an infectious disease. Also provided for herein is a method for treating cancer in a subject comprising, administering to the subject a population of genetically engineered immune cells, wherein the immune cells express a cytotoxic receptor comprising an extracellular ligand binding domain, a transmembrane domain, and a cytotoxic signaling complex, wherein the immune cells are genetically edited at one or more target locations in a CISH gene that encodes a CIS protein, wherein the edits yield reduced expression and/or function of CIS as compared to an immune cell not edited at the location or locations in the CISH gene, wherein the immune cells are genetically edited at one or more target locations in a CBLB gene that encodes a CBLB protein, wherein the edits yield reduced expression and/or function of CIS as compared to an immune cell not edited at the location or locations in the CBLB gene, wherein the immune cells are edited at one or more target locations in one more target genes selected from ADAM17, HIF-1a, DGKz, GSK-3B, LAG3, TIM3, TRIM29, IL-1R8, CD38, FBP-1, INSIG1, MED12, MED13, CCNC, CDK8, ID3, SOX4, or any combination thereof, wherein the edits are made using an RNA-guided endonuclease, and wherein the genetically engineered and edited immune cells exhibit one or more of enhanced expansion capability, enhanced cytotoxicity against target tumor cells, and enhanced persistence, particularly in a hypoxic tumor microenvironment, as compared to immune cells that do not comprise said genetically edited target site or sites. In several embodiments, the administered immune cells are allogeneic with respect the subject. In several embodiments, the treatment methods further comprise administering IL2.

[0111] In several embodiments, the immune cells are genetically edited within a target sequence in the ADAM17 gene. In several embodiments, the immune cells are genetically edited within a target sequence in the HIF1A gene. In several embodiments, the immune cells are genetically edited within a target sequence in the DGKz gene. In several embodiments, the immune cells are genetically edited within a target sequence in the GSK3B gene. In several embodiments, the immune cells are genetically edited within a target sequence in the LAG3 gene. In several embodiments, the immune cells are genetically edited within a target sequence in the TIM3 gene. In several embodiments, the immune cells are genetically edited within a target sequence in the TRIM29 gene. In several embodiments, the immune cells are genetically edited within a target sequence in the IL1R8 gene. In several embodiments, the immune cells are genetically edited within a target sequence in the CD38 gene. In several embodiments, the immune cells are genetically edited within a target sequence in the FBP1 gene. In several embodiments, the immune cells are genetically edited within a target sequence in the INSIG1 gene. In several embodiments, the immune cells are genetically edited within a target sequence in the MED12 gene. In several embodiments, the immune cells are genetically edited within a target sequence in the MED13 gene. In several embodiments, the immune cells are genetically edited within a target sequence in the CCNC gene. In several embodiments, the immune cells are genetically edited within a target sequence in the CDK8 gene. In several embodiments, the immune cells are genetically edited within a target sequence in the ID3 gene. In several embodiments, the immune cells are genetically edited within a target sequence in the SOX4 gene.

[0112] In several embodiments, ADAM17 is edited and wherein a guide sequence of any of SEQ ID NO: 682-687 is used to target the ADAM17 gene. In some embodiments, ADAM17 is edited at a target sequence comprising SEQ ID NO:682. In some embodiments, ADAM17 is edited at a target sequence comprising SEQ ID NO:683. In some embodiments, ADAM17 is edited at a target sequence comprising SEQ ID NO:684. In some embodiments, ADAM17 is edited at a target sequence comprising SEQ ID NO:685. In some embodiments, ADAM17 is edited at a target sequence comprising SEQ ID NO:686. In some embodiments, ADAM17 is edited at a target sequence comprising SEQ ID NO:687.

[0113] In several embodiments, ADAM17 is edited and the target sequence comprises any of SEQ ID NO: 682-687. In some embodiments, ADAM17 is edited and the target sequence comprises SEQ ID NO:682. In some embodiments, ADAM17 is edited and the target sequence comprises SEQ ID NO:683. In some embodiments, ADAM17 is edited and the target sequence comprises SEQ ID NO:684. In some embodiments, ADAM17 is edited and the target sequence comprises SEQ ID NO:685. In some embodiments, ADAM17 is edited and the target sequence comprises SEQ ID NO:686. In some embodiments, ADAM17 is edited and the target sequence comprises SEQ ID NO:687.

[0114] In several embodiments, MED12 is edited and wherein a guide sequence of any of SEQ ID NO:938-944 is used to target the MED12 gene. In some embodiments, MED12 is edited at a target sequence comprising SEQ ID NO:938. In some embodiments, MED12 is edited at a target sequence comprising SEQ ID NO:939. In some embodiments. MED12 is edited at a target sequence comprising SEQ ID NO:940. In some embodiments, MED12 is edited at a target sequence comprising SEQ ID NO:941. In some embodiments, MED12 is edited at a target sequence comprising SEQ ID NO:942. In some embodiments, MED12 is edited at a target sequence comprising SEQ ID NO:943. In some embodiments, MED12 is edited at a target sequence comprising SEQ ID NO:944. In some embodiments, MED12 is edited at a target sequence comprising SEQ ID NO:996. In some embodiments, MED12 is edited at a target sequence comprising SEQ ID NO:997. In some embodiments, MED12 is edited at a target sequence comprising SEQ ID NO:998.

[0115] In several embodiments, MED12 is edited and the target sequence comprises any of SEQ ID NO:938-944. In some embodiments, MED12 is edited and the target sequence comprises SEQ ID NO: 938. In some embodiments, MED12 is edited and the target sequence comprises SEQ ID NO:939. In some embodiments, MED12 is edited and the target sequence comprises SEQ ID NO:940. In some embodiments, MED12 is edited and the target sequence comprises SEQ ID NO:941. In some embodiments, MED12 is edited and the target sequence comprises SEQ ID NO:942. In some embodiments, MED12 is edited and the target sequence comprises SEQ ID NO:943. In some embodiments, MED12 is edited and the target sequence comprises SEQ ID NO:944. In some embodiments, MED12 is edited and the target sequence comprises SEQ ID NO: 996. In some embodiments, MED12 is edited and the target sequence comprises SEQ ID NO: 997. In some embodiments, MED12 is edited and the target sequence comprises SEQ ID NO: 998.

[0116] In several embodiments, CISH is edited and the target sequence comprises any of SEQ ID NO: 153-157, 463-466 or 1012-1013. In some embodiments, the target sequence comprises SEQ ID NO:153. In some embodiments, the target sequence comprises SEQ ID NO: 154. In some embodiments, the target sequence comprises SEQ ID NO:155. In some embodiments, the target sequence comprises SEQ ID NO:156. In some embodiments, the target sequence comprises SEQ ID NO:157. In some embodiments, the target sequence comprises SEQ ID NO:463. In some embodiments, the target sequence comprises SEQ ID NO:464. In some embodiments, the target sequence comprises SEQ ID NO:465. In some embodiments, the target sequence comprises SEQ ID NO:466. In some embodiments, the target sequence comprises SEQ ID NO: 1012. In some embodiments, the target sequence comprises SEQ ID NO:1013.

[0117] In several embodiments, HIF-1a is edited and wherein a guide sequence of any of SEQ ID NO: 750-760 is used to target the HIF-1a gene. In several embodiments, HIF-1a is edited and the target sequence comprises any of SEQ ID NO: 750-760. In several embodiments, DGKz is edited and wherein a guide sequence of any of SEQ ID NO: 688-723 is used to target the DGKz gene. In several embodiments, DGKz is edited and the target sequence comprises any of SEQ ID NO: 688-723. In several embodiments, GSK-3B is edited and wherein a guide sequence of any of SEQ ID NO: 724-749 is used to target the GSK-3B gene. In several embodiments, GSK-3B is edited and the target sequence comprises any of SEQ ID NO: 724-749. In several embodiments, LAG3 is edited and wherein a guide sequence of any of SEQ ID NO: 761-789 is used to target the LAG3 gene. In several embodiments, LAG3 is edited and the target sequence comprises any of SEQ ID NO: 761-789. In several embodiments, TIM3 is edited and wherein a guide sequence of any of SEQ ID NO: 790-825 is used to target the TIM3 gene. In several embodiments, TIM3 is edited and the target sequence comprises any of SEQ ID NO: 790-825. In several embodiments, TRIM29 is edited and wherein a guide sequence of any of SEQ ID NO: 826-835 is used to target the TRIM29 gene. In several embodiments, TRIM29 is edited and the target sequence comprises any of SEQ ID NO: 826-835. Tn several embodiments, TRIM29 is edited and wherein a guide sequence of any of SEQ ID NO: 167-169, 826-835, or 1009-1011 is used to target the TRIM29 gene. In several embodiments, TRIM29 is edited and the target sequence comprises any of SEQ ID NO: 167-169, 826-835 or 1009-1011. In several embodiments, IL-1R8 is edited and wherein a guide sequence of any of SEQ ID NO: 836-865 is used to target the IL-1R8 gene. In several embodiments. IL-1R8 is edited and the target sequence comprises any of SEQ ID NO: 836-865. In several embodiments, CD38 is edited and wherein a guide sequence of any of SEQ ID NO: 866-874 is used to target the CD38 gene. In several embodiments, CD38 is edited and the target sequence comprises any of SEQ ID NO: 866-874. In several embodiments, FBP-1 is edited and wherein a guide sequence of any of SEQ ID NO: 875-889 is used to target the FBP-1 gene. In several embodiments, FBP-1 is edited and the target sequence comprises any of SEQ ID NO: 875-889. In several embodiments, INSIG1 is edited and wherein a guide sequence of any of SEQ ID NO: 890-934 is used to target the INSIG1 gene. In several embodiments, INSIG1 is edited and the target sequence comprises any of SEQ ID NO: 890-934. In several embodiments, MED12 is edited and wherein a guide sequence of any of SEQ ID NO: 938-944 is used to target the MED12 gene. In several embodiments, MED12 is edited and wherein a guide sequence of any of SEQ ID NO: 938-944 or 996-998 is used to target the MED12 gene. In several embodiments, MED12 is edited and the target sequence comprises any of SEQ ID NO: 938-944. In several embodiments, MED12 is edited and the target sequence comprises any of SEQ ID NO: 938-944 or 996-998. In several embodiments, MED13 is edited and wherein a guide sequence of any of SEQ ID NO: 945-948 is used to target the MED13 gene. In several embodiments, MED13 is edited and the target sequence comprises any of SEQ ID NO: 945-948. In several embodiments, CDK8 is edited and wherein a guide sequence of any of SEQ ID NO: 949-955 is used to target the CDK8 gene. In several embodiments, CDK8 is edited and the target sequence comprises any of SEQ ID NO: 949-955. In several embodiments, CCNC is edited and wherein a guide sequence of any of SEQ ID NO: 956-961 is used to target the CCNC gene. In several embodiments, CCNC is edited and wherein a guide sequence of any of SEQ ID NO: 956-961 or 999-1001 is used to target the CCNC gene. In several embodiments, CCNC is edited and the target sequence comprises any of SEQ ID NO: 956-961. In several embodiments, CCNC is edited and the target sequence comprises any of SEQ ID NO: 956-961 or 999-1001. In several embodiments, ID3 is edited and wherein a guide sequence of any of SEQ ID NO: 963-969 is used to target the ID3 gene. In several embodiments, ID3 is edited and the target sequence comprises any of SEQ ID NO: 963-969. In several embodiments, SOX4 is edited and wherein a guide sequence of any of SEQ ID NO: 970-976 is used to target the SOX4 gene. In several embodiments, SOX4 is edited and the target sequence comprises any of SEQ ID NO: 970-976. In several embodiments, the immune cells are further edited at a CISH gene that encodes a CIS protein. In several embodiments, a guide sequence of any of SEQ ID NO: 153-157 or 463-466 is used to target the CISH gene. In several embodiments, a guide sequence of any of SEQ ID NO: 153-157, 463-466 or 1012-1013 is used to target the CISH gene. In several embodiments, CISH is edited and the target sequence comprises any of SEQ ID NO: 153-157 or 463-466. In several embodiments, CISH is edited and the target sequence comprises any of SEQ ID NO: 153-157, 463-466 or 1012-1013. In several embodiments, the cells are edited at an additional target site in a CBLB gene. In several embodiments, a guide sequence of any of SEQ ID NO: 164 to 166 or 453-456 is used to target the CBLB gene. In several embodiments, a guide sequence of any of SEQ ID NO: 164 to 166, 453-456 or 1005-1008 is used to target the CBLB gene. In several embodiments, CBLB is edited and the target sequence comprises any of SEQ ID NO: 164 to 166 or 453-456. In several embodiments, CBLB is edited and the target sequence comprises any of SEQ ID NO: 164 to 166, 453-456 or 1005-1008.

[0118] According to several embodiments, the cells are optionally further edited at a gene encoding CD70. In several embodiments, the cells are optionally edited at a TGFBR2 gene, a TIGIT gene, an adenosine A2 receptor gene, a SMAD3 gene, a MAPKAPK3 gene, a CEACAM1 gene, a DDIT4 gene, an NKG2A gene, a SOCS2 gene, a B2M gene, a PD-1gene, and/or a TCR alpha gene.

[0119] In several embodiments, at least a portion of the genetically engineered immune cells are engineered to express membrane bound IL-15. In several embodiments, the genetically engineered immune cells are engineered to express membrane bound IL-15. In some embodiments, the IL15 is expressed from a separate cassette on the construct comprising any one of the CARs disclosed herein. In some embodiments, the IL15 is expressed from a separate cassette on the construct comprising any one of the cytotoxic receptors disclosed herein. In some embodiments, the IL15 is expressed from the same cassette as any one of the CARs disclosed herein. In some embodiments, the IL15 is expressed from the same cassette as any one of the cytotoxic receptors disclosed herein. In some embodiments, the IL15 and cytotoxic receptor are expressed bicistronically. In some embodiments, the chimeric receptor and IL15 are separated by a nucleic acid sequence encoding a cleavage site, for example, a proteolytic cleavage site or a T2A, P2A, E2A, or F2A self-cleaving peptide cleavage site. In some embodiments, the chimeric receptor and IL15 are separated by a T2A sequence. In some embodiments, the IL15 is a membrane-bound IL15 (mbIL15).

[0120] In several embodiments, the immune cells comprise Natural Killer (NK) cells, T cells, induced pluripotent stem cells (iPSCs), iPSC-derived NK cells, NK-92 cells, or combinations thereof. In several embodiments, the immune cells comprise Natural Killer (NK) cells. In several embodiments, the genetically engineered and edited immune cells are suitable for use in allogeneic cancer cell therapy and wherein the cells maintain enhanced cytotoxicity and/or persistence in a hypoxic tumor microenvironment. In several embodiments, the genetically engineered and edited immune cells exhibit increased persistence in vivo as compared to genetically engineered cells not edited at a target sequence.

[0121] In several embodiments, the genetically engineered and edited immune cells provided for herein are used for the treatment of a disease or condition. In some embodiments, the disease or condition is an autoimmune disease. In several embodiments, the disease or condition is cancer. In several embodiments, the genetically engineered and edited immune cells provided for herein are used for the treatment of cancer. In several embodiments, the genetically engineered and edited immune cells provided for herein are used for the preparation of a medicament for the treatment of a disease or condition. In several embodiments, the disease or condition is an autoimmune disease. In several embodiments, the disease or condition is cancer. In several embodiments, the genetically engineered and edited immune cells provided for herein are used for the preparation of a medicament for the treatment of cancer.

### BRIEF DESCRIPTION OF THE DRAWINGS

[0122] FIG. 1A-1D depict non-limiting examples of tumor-directed chimeric antigen receptors.

[0123] FIG. 2 depicts a schematic workflow for assessing gene edits as disclosed herein.

[0124] FIG. 3A-3B show data related to expression of a non-limiting example of a CD19-directed CAR when cells are edited to disrupt expression of the indicated target genes. FIG. 3A shows data after editing of DGKz, GSK-3B, HIF-1a, TRIM29, IL-1R8, CD38, FBP-1 or electroporation (EP) control. FIG. 3B shows data after editing of ADAM17, LAG3, TIM3, INSIG1, CISH-15, or EP untransduced control. Similar results were achieved in cells from other donors (data not shown).

[0125] FIG. 4A-4C show data related to the knockout efficiency of ADAM17, LAG3, and TIM3 in a non-limiting example of NK cells expressing a CD19-directed CAR when cells are edited to disrupt expression of the indicated target genes. FIG. 4A depicts ADAM17KO efficiency in cells at day 11, with APC isotype controls and EP untransduced controls. FIG. 4B depicts TIM3 and CD38KO efficiency in cells at day 11. FIG. 4C depicts LAG3KO efficiency in cells at day 11. Similar results were achieved in cells from other donors (data not shown).

[0126] FIG. 5A-C depict summary expression data of the indicated genes post-editing in a non-limiting example of a CD19-directed CAR. FIG. 5A summarizes data from a first donor (512), FIG. 5C summarizes data from a second donor (558), and FIG. 5B summarizes data from a third donor (548).

[0127] FIG. 6 depicts the results of on-target INDEL analysis via CRISPR for the indicated genes in donors 558, 548, and 512 in a non-limiting example of a CD19-directed CAR.

[0128] FIG. 7A-B depict a summary of the fold expansion results for the cells expressing CD19-directed CAR when cells were edited to disrupt expression of the indicated target genes. Fold expansion was determined at days 0-7, 7-14, and 0-14 for cells from donors 512 (FIG. 7A) and 558 (FIG. 7B).

[0129] FIG. 8A-8B depict in vitro cytotoxicity data against tumor cells. FIG. 8 shows data related to NK cells expressing a non-limiting example of a CD19-directed CAR and tested as indicated (single edits) beginning at day 14 (FIG. 8A) and day 21 (FIG. 8B). Similar results were seen in cells from other donors (data not shown).

[0130] FIG. 9A-9B relate to glycolysis stress test and hypoxia data. FIG. 9A shows corresponding extracellular acidification rate (ECAR) data for NK cells expressing a CD19-directed CAR and edited as indicated. FIG. 9B shows additional data from the evaluation of the oxygen consumption rate (OCR) for cells and determination of mitochondrial vs. non-mitochondrial respiration in NK cells expressing a CD19-CAR and edited as indicated.

[0131] FIG. 10 depicts the results of a cytokine production assessment following coculture of NK cells from donor 512 expressing a CD19-CAR and edited as indicated incubated with Raji cells for 3 days, where the results for CD19-CAR expressing, gene edited, groups are compared to cytokine levels in EP control, Raji cells, and CD19-CAR expressing cells without additional gene editing.

[0132] FIG. 11 depicts a schematic workflow for assessing gene edits as disclosed herein.

[0133] FIG. 12 depicts summary expression data for the cells expressing a non-limiting example of a CD70-directed CAR and edited to disrupt expression of the indicated target genes. % viability, % CD70 positive cells, and % CAR positive cells were indicated for each group in comparison to an unedited, untransduced control.

[0134] FIG. 13 depicts a summary of the fold expansion results for the cells expressing a non-limiting example of a CD70-directed CAR when cells were edited to disrupt expression of the indicated target genes. Fold expansion was determined at days 0-6, 6-7, 7-14, and 0-14.

[0135] FIG. 14 depicts in vitro cytotoxicity data against tumor cells. FIG. 14 shows data related to NK cells expressing a non-limiting example of a CD70-directed CAR and edited as indicated from donor 512 at day 14 against HL60 and Molm13 cells. Each assay was performed at a 1:2 ratio of effector cells to target cells (E:T) and controls were target (tumor) cells alone and incubation of target (tumor) cells with unedited, untransduced NK cells (EP).

[0136] FIG. 15 depicts the results of a cell mitochondrial stress test where NK cells expressing a non-limiting example of a CD70-directed CAR and edited as indicated were treated with lactate for three days before assessment of OCR.

[0137] FIG. 16 depicts a schematic workflow for assessing gene edits as disclosed herein.

[0138] FIG. 17 depicts summary expression data for cells expressing a non-limiting example of a CD70-directed CAR and edited to disrupt expression of the indicated target genes. % ADAM17 positive, % CD70 positive cells, and % CAR positive cells were indicated for each group in comparison to an unedited, untransduced control (EP).

[0139] FIG. 18 depicts a summary of the fold expansion results for the cells expressing a non-limiting example of a CD70-directed CAR when cells were edited to disrupt expression of the indicated target genes. Fold expansion was determined at days 0-7, 7-15, and 1-15.

[0140] FIG. 19A-19D depict in vitro cytotoxicity data against tumor cells. FIG. 19A-19B show data related to NK cells expressing a non-limiting example of a CD70-directed CAR and tested as indicated beginning at day 14 against 786-0 cells with an effector to target ratio (E:T) of 1:2 for FIG. 19A and 1:4 for FIG. 19B. FIG. 19C-19D show cytotoxicity data related to NK cells expressing a non-limiting example of a CD70-directed CAR and tested as indicated beginning at day 14 against HL60 cells with an E:T of 1:1 for FIG. 19C and 1:2 for FIG. 19D.

[0141] FIG. 20 depicts the results of a cell mitochondrial stress test under hypoxic conditions for NK cells expressing a non-limiting example of a CD70-directed CAR and edited as indicated.

[0142] FIG. 21 depicts a schematic workflow for assessing gene edits as disclosed herein.

[0143] FIG. 22A-22B show data related to expression of a non-limiting example of a CD19-directed CAR when cells are edited to disrupt expression of ADAM17. FIG. 22A depicts the expression of the CD19 CAR on NK cells day 4 post-transduction. FIG. 22B depicts verification of knockout of ADAM17 from NK cells of donor 512 and 558.

[0144] FIG. 23A-23B depict assessment of CD16 and CD62L expression on cells expressing a non-limiting example of CD19-directed CAR and edited at ADAM17 (ADAM17 KO) and treated with DMSO (control), or with phorbol myristate acetate (PMA) stimulation at 1 μg/mL for 1 hour. Similar results were seen in cells from other donors (data not shown). FIG. 23B summarizes the data of FIG. 23A and reports CD16 and CD62L % positive and MFI for control and PMA treated conditions for EP control and ADAM17 edited cells with and without NKX19 for cells from two donors.

[0145] FIG. 23C depicts assessment of the expression of various ADAM17 substrates on cells expressing a non-limiting example of a CD70-directed CAR and edited at ADAM17 (ADAM17 KO) and treated with DMSO (control) or PMA stimulation at 1 μg/mL for 1 hour.

[0146] FIG. 24A-24G depict in vitro cytotoxicity data of NK cells edited as indicated against tumor cells. FIG. 24A depicts a study where Raji and Nalm6 cells were evaluated for CD20 expression.

[0147] FIG. 24B shows the cytotoxicity assay results for ADAM17 edited cells from donor 512 and 558 tested against Raji cells at E:T 2:1. In FIG. 24C-24G, Raji cells were precoated with Cetuximab (anti-EGFR) or Rituximab (anti-CD20) for 30 minutes in order to determine if antibody dependent cytotoxicity (ADCC) was enhanced when antibody coated Raji cells were incubated with CAR NKs with ADAM17 editing. FIG. 24C shows results for NK cells expressing a CD70-directed CAR and edited as indicated with or without the presence of Cetuximab at an E:T of 1:2 (FIG. 24C) or 1:4 (FIG. 24D). Additional ADCC assays were performed following incubation of target cells with Rituximab, the assays were performed at 1:2 (FIG. 24E) and 1:4 (FIG. 24F) with expression of a CD19-directed CAR, and at 1:1 without expression of a CD19-directed CAR (FIG. 24G).

[0148] FIG. 25 depicts a schematic workflow for assessing gene edits as disclosed herein.

[0149] FIG. 26 summarizes % viability and fold expansion data from day 1 and day 3 for NK cells expressing a non-limiting example of a CD70-directed CAR and edited as indicated.

[0150] FIG. 27A-27F depict flow cytometry results for NK cells expressing a non-limiting example of a CD70-directed CAR and edited as indicated. FIG. 27A-27B depict CD56 and CD70 staining of NK cells expressing a CD70-directed CAR and edited as indicated. FIG. 27C-27E depicts % CD70 positive cells for edited for CD38 (FIG. 27C), LAG3 (FIG. 27D), ADAM17 (FIG. 27E). FIG. 27F summarizes the data from FIG. 27C-27E.

[0151] FIG. 28 depicts the results of a cell mitochondrial stress test under hypoxic conditions for NK cells expressing a non-limiting example of a CD70-directed CAR and edited as indicated.

[0152] FIG. 29A-29B depict in vitro cytotoxicity data against tumor cells for NK cells expressing a non-limiting example of a CD70-directed CAR and edited as indicated. FIG. 29A shows cytotoxicity data for CD70 directed CARs edited to be triple knockouts. FIG. 29B shows cytotoxicity data for CD70 directed CARs edited to be quadruple knockouts.

[0153] FIG. 30A depicts the results of an in vivo anti-tumor activity assay where mice were injected with 786-0 cells at day −7, followed by injection of NK cells expressing a non-limiting example of a CD70-directed CAR and edited as indicated to be double (CISH/CBLB) or triple (CISH/CBLB/HIF1a, CISH/CBLB/ADAM17, or CISH/CBLB/FBP1) knockouts at day 0 and assessment of tumor volume (TV) over a 25 day period.

[0154] FIG. 30B depicts the results of an in vivo anti-tumor activity assay where mice were injected with HL60 cells at day −2, followed by injection of NK cells expressing a non-limiting example of a CD70-directed CAR and edited as indicated to be double (CISH/CBLB) or triple (CISH/CBLB/ADAM17) knockouts at day 0 and assessment of tumor volume (TV) over a 30 day period.

[0155] FIG. 31 depicts a schematic workflow for assessing gene edits as disclosed herein.

[0156] FIG. 32A-32B depicts in vitro cytotoxicity data against tumor cells for NK cells expressing a non-limiting example of a CD70-directed CAR and edited as indicated for the following genes: MED12, CCNC, CDK8. ID3, SOX4.

[0157] FIG. 33 depicts expression of a CD70 targeting CAR by NK cells from three different donors edited as indicated for the following genes: CD70, MED12, CDK8, CCNC, CISH, ID3, SOX4.

[0158] FIG. 34A-34B relate to a glycolysis stress test and glycolytic capacity, respectively. FIG. 34A and FIG. 34B show corresponding extracellular acidification rate (ECAR) and the oxygen consumption rate (OCR) data for NK cells expressing a CD70-directed CAR and edited as indicated.

[0159] FIG. 35 depicts expression of a CD19 targeting CAR by NK cells from a donor edited at the indicated target genes.

[0160] FIG. 36A-36B depict in vitro cytotoxicity data against Nalm6 tumor cells. FIG. 36A-36B show data related to NK cells expressing a non-limiting example of a CD19-directed CAR and edited as indicated at day 6 against Nalm6 cells with an effector to target ratio (E:T) of 1:1 and in the absence of TGF-β for FIG. 36A and in the presence of TGF-β for FIG. 36B.

[0161] FIG. 37 relates to the extracellular acidification rate (ECAR) data for NK cells expressing a CD19-directed CAR and edited as indicated.

[0162] FIG. 38A-38B relate to the proliferative ability of NK cells expressing a CD19-directed CAR and edited as indicated. FIG. 38A depicts the proliferative ability of the edited CD19-CAR NK cells from three different healthy donors and FIG. 38B depicts the quantification of the data presented in FIG. 38A.

[0163] FIG. 39 depicts a schematic workflow for assessing gene edits as disclosed herein.

[0164] FIG. 40A-40B depict in vitro cytotoxicity data against Nalm6 tumor cells. FIG. 40A-40B show data related to NK cells expressing a non-limiting example of a CD19-directed CAR and tested as indicated beginning at day 14 against Nalm6 cells in the absence (FIG. 40A) or presence (FIG. 40B) of TGF-β with Nalm6 target cells at a 1:2 or 1:1 E:T ratio, respectively.

[0165] FIG. 40C depicts assessment of cytokine production of the CD19-CAR NK cells from a donor edited as indicated at day 6 in the absence or presence of TGF-β with Nalm6 cells at a 1:1 E:T ratio by Luminex® multiplex assay.

[0166] FIG. 41A depicts a schematic of in vivo treatment with CD19 CAR NK cells edited as indicated.

[0167] FIG. 41B-41C depict tumor burden (FIG. 41B) and persistence of CD19 CAR NK cells (FIG. 41C), respectively, in a murine model of acute lymphoblastic leukemia (ALL).

[0168] FIG. 42A-42B depict the cytotoxicity of BCMA1 CAR-expressing NK cells edited at the indicated targets against BCMA-expressing Daudi cells at effector-to-target ratios (E:T) of 1:2 and 1:4, respectively.

[0169] FIG. 43A-43B depict the cytotoxicity of BCMA2 CAR-expressing NK cells edited at the indicated targets against BCMA-expressing MM.1S cells at effector-to-target ratios (E:T) of 1:1 and 1:2, respectively.

### DETAILED DESCRIPTION

[0170] Some embodiments of the methods and compositions provided herein relate to engineered immune cells and combinations of the same for use in immunotherapy. In several embodiments, the engineered cells are engineered in multiple ways, for example, to express a cytotoxicity-inducing receptor complex. As used herein, the term “cytotoxic receptor complexes” shall be given its ordinary meaning and shall also refer to (unless otherwise indicated), Chimeric Antigen Receptors (CAR) and chimeric receptors (also called activating chimeric receptors in the case of NKG2D chimeric receptors). In several embodiments, the cells are further engineered to achieve a modification of the reactivity of the cells against non-tumor tissue. Several embodiments relate to the modification of T cells, through various genetic engineering methodologies, such that the resultant T cells have reduced and/or eliminated alloreactivity. Such non-alloreactive T cells can also be engineered to express a chimeric antigen receptor (CAR) that enables the non-alloreactive T cells to impart cytotoxic effects against tumor cells. In several embodiments, natural killer (NK) cells are also engineered to express a cytotoxicity-inducing receptor complex (e.g., a chimeric antigen receptor or chimeric receptor). In several embodiments, combinations of these engineered immune cell types are used in immunotherapy, which results in both a rapid (NK-cell based) and persistent (T-cell based) anti-tumor effect, all while advantageously having little to no graft versus host disease (GvHD). Some embodiments include methods of use of the compositions or cells in immunotherapy.

[0171] While autologous CAR T cell therapies have been developed and shown to exhibit substantial in vivo persistence and efficacy, the majority of patients treated with autologous CAR T cell therapy will experience cytokine release syndrome (CRS) and/or a neurotoxicity. Further, autologous CAR T cell therapies face numerous challenges, including the need to leukapherese and then manufacture a conforming CAR T cell product from patients who are often extremely sick, heavily pre-treated, or both. Manufacturing sufficient numbers of CAR T cells from such patients can be difficult, or in some cases, impossible. In addition, a potential patient may not survive the length of time it takes to manufacture the final CAR T cell product from the T cells obtained from the patient.

[0172] By contrast, NK cell therapies, including allogeneic NK cell therapies manufactured from healthy donors, can obviate many of these challenges. For example, manufacturing success rates for allogeneic CAR NK cells may be higher due to better quality of incoming donor cells. Allogeneic CAR NK cell therapies can also be provided when a patient is in need, without having to wait for the patient's own cells to be manufactured. Thus, allogeneic NK cell therapies are being investigated for use as off-the-shelf products. Despite the potential advantages offered by NK cells, they have not been shown to persist in vivo to the same extent as T cells. Solutions are therefore needed to overcome this challenge. Described herein are genetic edits that can increase the persistence, efficacy (e.g., cytotoxicity), or both, of NK cells. Embodiments of such genetically edited NK cells include compositions and methods of using the same to treat a disease or condition (e.g., cancer) in a subject. For example, experiments described herein found that disruption of particular genes, including e.g., ADAM17, MED12, CISH, CBLB, or a combination thereof, imparted surprisingly beneficial effects to NK cells, including enhanced cytotoxicity, both in vitro and in vivo. These results were observed in NK cells expressing CARs targeting different antigens (e.g., BCMA, CD19 or CD70). Without wishing to be bound by theory, these findings are consistent with an observation that such gene edits can impart advantages to CAR-expressing NK cells, regardless of the particular antigen targeted by the CAR.

[0173] The term “anticancer effect” refers to a biological effect which can be manifested by various means, including but not limited to, a decrease in tumor volume, a decrease in the number of cancer cells, a decrease in the number of netastases, an increase in life expectancy, decrease in cancer cell proliferation, decrease in cancer cell survival, and/or amelioration of various physiological symptoms associated with the cancerous condition.

### Cell Types

[0174] Some embodiments of the methods and compositions provided herein relate to a cell such as an immune cell. In some embodiments, an immune cell is engineered to express a chimeric receptor that binds to an antigen (e.g., an antigen expressed by a cancer cell). For example, an immune cell, such as a T cell, may be engineered to include a chimeric receptor such as a CD19-directed chimeric receptor, or engineered to include a nucleic acid encoding said chimeric receptor as described herein. In some embodiments, a NK cell is engineered to express a chimeric receptor that binds to an antigen (e.g., an antigen expressed by a cancer cell). Additional embodiments relate to engineering a second set of cells to express another cytotoxic receptor complex, such as an NKG2D chimeric receptor complex as disclosed herein. Thus, in some embodiments, combinations or compositions comprising two different types of immune cells, (e.g., T cells and NK cells) are contemplated. In some embodiments, the engineered T cells and the engineered NK cells express the same chimeric receptor. In some embodiments, the engineered T cells and the engineered NK cells express different chimeric receptors. In some embodiments, the engineered T cells and the engineered NK cells express chimeric receptors that bind to the same antigen (e.g., different epitopes of the same antigen). In some embodiments, the engineered T cells and the engineered NK cells express chimeric receptors that binds different antigens.

[0175] Additional embodiments relate to the further genetic manipulation of NK cells (e.g., donor NK cells) to increase persistence and/or potency of engineered NK cells. Still additional embodiments relate to the further genetic manipulation of T cells (e.g., donor T cells) to reduce, disrupt, minimize and/or eliminate the ability of the donor T cell to be alloreactive against recipient cells (graft versus host disease). For example, in some embodiments, T cells are engineered to reduce alloreactivity against recipient cells.

[0176] Traditional anti-cancer therapies relied on a surgical approach, radiation therapy, chemotherapy, or combinations of these methods. As research led to a greater understanding of some of the mechanisms of certain cancers, this knowledge was leveraged to develop targeted cancer therapies. Targeted therapy is a cancer treatment that employs certain drugs that target specific genes or proteins found in cancer cells or cells supporting cancer growth, (like blood vessel cells) to reduce or arrest cancer cell growth. More recently, genetic engineering has enabled approaches to be developed that harness certain aspects of the immune system to fight cancers. In some cases, a patient's own immune cells are modified to specifically eradicate that patient's type of cancer. Various types of immune cells can be used, such as T cells, Natural Killer (NK cells), or combinations thereof, as described in more detail below.

[0177] To facilitate cancer immunotherapies, there are provided for herein polynucleotides (e.g., encoding chimeric receptors), polypeptides (e.g., chimeric receptors), and vectors that encode chimeric antigen receptors (CAR) that comprise a target binding moiety (e.g., an extracellular binder of a ligand, or a tumor marker-directed chimeric receptor, expressed by a cancer cell) and a cytotoxic signaling complex. For example, some embodiments include a polynucleotide, polypeptide, or vector that encodes, for example a chimeric antigen receptor directed against a tumor marker, for example, CD19, CD123, CD70, Her2, mesothelin, Claudin 6, BCMA, EGFR, among others, to facilitate targeting of an immune cell to a cancer and exerting cytotoxic effects on the cancer cell. Also provided are engineered immune cells (e.g., T cells or NK cells) expressing such CARs. In some embodiments, a chimeric antigen receptor binds to ligands of NKG2D. In some embodiments, a chimeric antigen receptor binds to CD19. In some embodiments, a chimeric antigen receptor binds to CD70. In some embodiments, a chimeric antigen receptor binds to BCMA. There are also provided herein, in several embodiments, polynucleotides, polypeptides, and vectors that encode a construct comprising an extracellular domain comprising two or more subdomains, e.g., first CD19-targeting subdomain comprising a CD19 binding moiety as disclosed herein and a second subdomain comprising a C-type lectin-like receptor and a cytotoxic signaling complex. Also provided are engineered immune cells (e.g., T cells or NK cells) expressing such bi-specific constructs. Methods of treating cancer and other uses of such cells for cancer immunotherapy are also provided for herein.

[0178] Also provided are chimeric receptors that comprise an antigen-binding domain and a cytotoxic signaling complex. For example, some embodiments include a chimeric receptor directed against a tumor antigen (e.g., CD19, BCMA, or CD70). Also provided are immune cells (e.g., NK cells) genetically engineered to express such CARs. In some embodiments, the immune cells are genetically edited (e.g., at MED12 and/or CISH).

[0179] To facilitate cancer immunotherapies, there are also provided for herein polynucleotides (e.g., encoding chimeric receptors), polypeptides (e.g., chimeric receptors), and vectors that encode chimeric receptors that comprise a target binding moiety (e.g., an extracellular binder of a ligand expressed by a cancer cell) and a cytotoxic signaling complex. For example, some embodiments include a polynucleotide, polypeptide, or vector that encodes, for example an activating chimeric receptor comprising an NKG2D extracellular domain that is directed against a tumor marker, for example, MICA, MICB, ULBP1, ULBP2, ULBP3, ULBP4, ULBP5, and ULBP6, among others, to facilitate targeting of an immune cell to a cancer and exerting cytotoxic effects on the cancer cell. In some embodiments, the chimeric receptor comprises an extracellular domain of NKG2D.

[0180] Also provided are engineered immune cells (e.g., T cells or NK cells) expressing such chimeric receptors. There are also provided herein, in several embodiments, polynucleotides, polypeptides, and vectors that encode a construct comprising an extracellular domain comprising two or more subdomains, e.g., first and second ligand binding receptor and a cytotoxic signaling complex. Also provided are engineered immune cells (e.g., T cells or NK cells) expressing such bi-specific constructs (in some embodiments the first and second ligand binding domain target the same ligand). Methods of treating cancer and other uses of such cells for cancer immunotherapy are also provided for herein.

### Engineered Cells for Immunotherapy

[0181] In several embodiments, cells of the immune system are engineered to have enhanced cytotoxic effects against target cells, such as tumor cells. For example, a cell of the immune system may be engineered to include a tumor-directed chimeric receptor and/or a tumor-directed CAR as described herein. In several embodiments, white blood cells or leukocytes, are used, since their native function is to defend the body against growth of abnormal cells and infectious disease. There are a variety of types of white bloods cells that serve specific roles in the human immune system, and are therefore a preferred starting point for the engineering of cells disclosed herein. White blood cells include granulocytes and agranulocytes (presence or absence of granules in the cytoplasm, respectively). Granulocytes include basophils, eosinophils, neutrophils, and mast cells. Agranulocytes include lymphocytes and monocytes. Cells such as those that follow or are otherwise described herein may be engineered to include a chimeric receptor, such as an NKG2D chimeric receptor, and/or a CAR, such as a CD19-directed CAR, or a nucleic acid encoding the chimeric receptor or the CAR. In several embodiments, the cells are optionally engineered to co-express a membrane-bound interleukin 15 (mbIL15) domain. In some embodiments, the immune cells engineered to express a chimeric receptor are engineered to bicistronically express a mbIL15 domain. As discussed in more detail below, in several embodiments, the cells, particularly T cells, are further genetically modified to reduce and/or eliminate the alloreactivity of the cells.

### Monocytes for Immunotherapy

[0182] In some embodiments, the immune cells comprise monocytes. Monocytes are a subtype of leukocyte. Monocytes can differentiate into macrophages and myeloid lineage dendritic cells. Monocytes are associated with the adaptive immune system and serve the main functions of phagocytosis, antigen presentation, and cytokine production. Phagocytosis is the process of uptake of cellular material, or entire cells, followed by digestion and destruction of the engulfed cellular material.

[0183] In some embodiments, a monocyte is positive for cell surface expression of a marker selected from among the group consisting of CCR2, CCR5, CD11c, CD14, CD16, CD62L, CD68+, CX3CR1, HLA-DR, or any combination thereof. In some embodiments, a monocyte is positive for cell surface expression of CD14. In some embodiments, a monocyte is positive for cell surface expression of CCR2. In some embodiments, a monocyte is positive for cell surface expression of CCR5. In some embodiments, a monocyte is positive for cell surface expression of CD62L.

[0184] In several embodiments, monocytes are used in connection with one or more additional engineered cells as disclosed herein. Some embodiments of the methods and compositions described herein relate to a monocyte that includes a tumor-directed CAR, or a nucleic acid encoding the tumor-directed CAR. In some embodiments, the monocytes express a CAR that binds to a tumor antigen, for example, CD19, CD123, CD70, Her2, mesothelin, Claudin 6, BCMA, or EGFR.

[0185] In some embodiments, the monocytes are engineered to express a membrane-bound interleukin 15 (mbIL15) domain. In some embodiments, the monocytes engineered to express a chimeric receptor are also engineered to also express (e.g., bicistronically express) a membrane-bound interleukin 15 (mbIL15) domain. Thus, in some embodiments, the monocytes are engineered to bicistronically express the chimeric receptor and mbIL15. Several embodiments of the methods and compositions disclosed herein relate to monocytes engineered to express a CAR that targets a tumor marker, for example, CD19, CD123, CD70, Her2, mesothelin, Claudin 6, BCMA, EGFR. among any of the others disclosed herein, and a membrane-bound interleukin 15 (mbIL15) domain. Several embodiments of the methods and compositions disclosed herein relate to monocytes engineered to express an activating chimeric receptor that targets a ligand on a tumor cell, for example, MICA, MICB, ULBP1, ULBP2, ULBP3, ULBP4, ULBP5, and ULBP6 (among others) and optionally a membrane-bound interleukin 15 (mbIL15) domain.

[0186] In some embodiments, the monocytes are allogeneic cells. In some embodiments, the monocytes are obtained from a donor who does not have cancer.

### Lymphocytes for Immunotherapy

[0187] In some embodiments, the immune cells comprise lymphocytes. Lymphocytes, the other primary sub-type of leukocyte include T cells (cell-mediated, cytotoxic adaptive immunity), natural killer cells (cell-mediated, cytotoxic innate immunity), and B cells (humoral, antibody-driven adaptive immunity). While B cells are engineered according to several embodiments, disclosed herein, several embodiments also relate to engineered T cells or engineered NK cells (mixtures of T cells and NK cells are used in some embodiments, either from the same donor, or different donors). Thus, in some embodiments, the immune cells comprise T cells. In some embodiments, the immune cells comprise NK cells. In some embodiments, the immune cells comprise T cells and NK cells. In some embodiments, the immune cells comprise B cells.

[0188] In several embodiments, lymphocytes are used in connection with one or more additional engineered cells as disclosed herein. Some embodiments of the methods and compositions described herein relate to a lymphocyte that includes a tumor-directed CAR, or a nucleic acid encoding the tumor-directed CAR. In some embodiments, the lymphocytes express a CAR that binds to a tumor antigen, for example, CD19, CD123, CD70. Her2, mesothelin, Claudin 6, BCMA, or EGFR.

[0189] In some embodiments, the lymphocytes are engineered to express a membrane-bound interleukin 15 (mbIL15) domain. In some embodiments, the lymphocytes engineered to express a chimeric receptor are also engineered to also express (e.g., bicistronically express) a membrane-bound interleukin 15 (mbIL15) domain. Thus, in some embodiments, lymphocytes are engineered to bicistronically express the chimeric receptor and mbIL15. Several embodiments of the methods and compositions disclosed herein relate to lymphocytes engineered to express a CAR that targets a tumor marker, for example, CD19, CD123, CD70, Her2, mesothelin, Claudin 6, BCMA, EGFR, among any of the others disclosed herein, and a membrane-bound interleukin 15 (mbIL15) domain. Several embodiments of the methods and compositions disclosed herein relate to lymphocytes engineered to express an activating chimeric receptor that targets a ligand on a tumor cell, for example, MICA, MICB, ULBP1. ULBP2, ULBP3, ULBP4, ULBP5, and ULBP6 (among others) and optionally a membrane-bound interleukin 15 (mbIL15) domain.

[0190] In some embodiments, the lymphocytes are allogeneic cells. In some embodiments, the lymphocytes are obtained from a donor who does not have cancer.

### T Cells for Immunotherapy

[0191] In some embodiments, the immune cells comprise T cells. T cells are distinguishable from other lymphocytes sub-types (e.g., B cells or NK cells) based on the presence of a T-cell receptor on the cell surface.

[0192] T cells can be divided into various different subtypes, including effector T cells, helper T cells, cytotoxic T cells, memory T cells, regulatory T cells, natural killer T cell, mucosal associated invariant T cells and gamma delta T cells. In some embodiments, a specific subtype of T cell is engineered. In some embodiments, a T cell is positive for cell surface expression of a marker selected from among the group consisting of CD3, CD4, and/or CD8. In some embodiments, a T cell is positive for cell surface expression of CD3. In some embodiments, a T cell is positive or cell surface expression of CD4. In some embodiments, a T cell is positive or cell surface expression of CD8.

[0193] In some embodiments, CD3+ T cells are engineered. In some embodiments, CD4+ T cells are engineered. In some embodiments, CD8+ T cells are engineered. In some embodiments, regulatory T cells are engineered. In some embodiments, gamma delta T cells are engineered. In some embodiments, a mixed pool of T cell subtypes is engineered. For example, in some embodiments, CD4+ and CD8+ T cells are engineered. In some embodiments, there is no specific selection of a type of T cells to be engineered to express the cytotoxic receptor complexes disclosed herein. In several embodiments, specific techniques, such as use of cytokine stimulation are used to enhance expansion/collection of T cells with a specific marker profile. For example, in several embodiments, activation of certain human T cells, e.g. CD4+ T cells, CD8+ T cells is achieved through use of CD3 and/or CD28 as stimulatory molecules.

[0194] In several embodiments, there is provided a method of treating or preventing cancer or an infectious disease, comprising administering a therapeutically effective amount of T cells expressing the cytotoxic receptor complex and/or a homing moiety as described herein. In several embodiments, there is provided a method of treating or preventing cancer or an infectious disease, comprising administering T cells expressing a cytotoxic receptor complex as described herein. In several embodiments, the engineered T cells are autologous cells, while in some embodiments, the T cells are allogeneic cells. In some embodiments, the T cells are allogeneic cells. In some embodiments, the T cells are obtained from a donor who does not have cancer.

[0195] Several embodiments of the methods and compositions disclosed herein relate to T cells engineered to express a CAR that targets a tumor marker, for example, CD19, CD123, CD70, Her2, mesothelin, Claudin 6, BCMA, EGFR, among any of the others as disclosed herein, and a membrane-bound interleukin 15 (mbIL15) domain. In some embodiments, T cells express a CAR that binds to CD19. In some embodiments. T cells express a CAR that binds to CD70. In some embodiments, T cells express a CAR that binds to BCMA. Several embodiments of the methods and compositions disclosed herein relate to T cells engineered to express an activating chimeric receptor that targets a ligand on a tumor cell, for example, MICA, MICB, ULBP1, ULBP2, ULBP3, ULBP4, ULBP5, and ULBP6 (among others) and optionally a membrane-hound interleukin 15 (mbIL15) domain. In some embodiments, T cells express a chimeric receptor that binds to a NKG2D ligand. In some embodiments, T cells express a chimeric receptor comprising an extracellular domain of NKG2D.

[0196] In some embodiments, the T cells are engineered to express a membrane-bound interleukin 15 (mbIL15) domain. In some embodiments, the T cells engineered to express a chimeric receptor are also engineered to also express (e.g., bicistronically express) a membrane-bound interleukin 15 (mbIL15) domain. Thus, in some embodiments, the T cells are engineered to bicistronically express the chimeric receptor and mbIL15.

[0197] In some embodiments, the immune cells comprise T cells and NK cells (either from the same donor or from different donors).

### NK Cells for Immunotherapy

[0198] In some embodiments, the immune cells comprise natural killer (NK) cells. In several embodiments, there is provided a method of treating or preventing cancer or an infectious disease, comprising administering a therapeutically effective amount of natural killer (NK) cells expressing the cytotoxic receptor complex and/or a homing moiety as described herein. In several embodiments, there is provided a method of treating or preventing cancer comprising administering a natural killer (NK) cells expressing a cytotoxic receptor complex as described herein. In several embodiments, there is provided a method of treating or preventing an infectious disease comprising administering a natural killer (NK) cells expressing a cytotoxic receptor complex as described herein. In several embodiments, the engineered NK cells are autologous cells, while in some embodiments, the NK cells are allogeneic cells.

[0199] In several embodiments, NK cells are preferred because the natural cytotoxic potential of NK cells is relatively high. In several embodiments, it is unexpectedly beneficial that the engineered cells disclosed herein can further upregulate the cytotoxic activity of NK cells, leading to an even more effective activity against target cells (e.g., tumor or other diseased cells).

[0200] In some embodiments, a NK cell is positive for cell surface expression of a marker selected from among the group consisting of CCR7, CD16, CD56, CD57, CD 11, CX3CR1, a Killer Ig-like receptor (KIR), NKp30, NKp44, NKp46, or any combination thereof. In some embodiments, a NK cell is positive for cell surface expression of CD16. In some embodiments, a NK cell is positive for cell surface expression of CD56. In some embodiments, a NK cell is positive for cell surface expression of a Killer Ig-like receptor.

[0201] Some embodiments of the methods and compositions described herein relate to NK cells engineered to express a CAR that targets a tumor marker, for example, CD19, CD123, CD70, Her2, mesothelin, Claudin 6, BCMA, EGFR, among any of the others disclosed herein, and optionally a membrane-bound interleukin 15 (mbIL15) domain. In some embodiments, NK cells express a CAR that hinds to CD19. In some embodiments, NK cells express a CAR that binds to CD70. Tn some embodiments, NK cells express a CAR that binds to BCMA. Several embodiments of the methods and compositions disclosed herein relate to NK cells engineered to express an activating chimeric receptor that targets a ligand on a tumor cell, for example, MICA, MICB, ULBP1, ULBP2, ULBP3, ULBP4, ULBP5, and ULBP6 (among others) and optionally a membrane-bound interleukin 15 (mbIL15)domain. In some embodiments, NK cells express a chimeric receptor that binds to a NKG2D ligand. In some embodiments, NK cells express a chimeric receptor comprising an extracellular domain of NKG2D.

[0202] In some embodiments, the NK cells are engineered to express a membrane-bound interleukin 15 (mbIL15) domain. In some embodiments, the NK cells engineered to express a chimeric receptor are also engineered to also express (e.g., bicistronically express) a membrane-bound interleukin 15 (mbIL15) domain. Thus, in some embodiments, the NK cells are engineered to bicistronically express the chimeric receptor and mbIL15.

[0203] In some embodiments, the NK cells are derived from cell line NK-92. NK-92 cells are derived from NK cells, but lack major inhibitory receptors displayed by normal NK cells, while retaining the majority of activating receptors. Some embodiments of NK-92 cells described herein related to NK-92 cell engineered to silence certain additional inhibitory receptors, for example, SMAD3, allowing for upregulation of interferon-γ (IFNγ), granzyme B, and/or perforin production. Additional information relating to the NK-92 cell line is disclosed in WO 1998/49268 and U.S. Patent Application Publication No. 2002-0068044 and incorporated in their entireties herein by reference.

[0204] In some embodiments, the NK cells are used in combination with T cells. Thus, in some embodiments, the immune cells comprise T cells and NK cells (either from the same donor or from different donors). NK-92 cells are used, in several embodiments, in combination with one or more of the other cell types disclosed herein. For example, in one embodiment, NK-92 cells are used in combination with NK cells as disclosed herein. In an additional embodiment, NK-92 cells are used in combination with T cells as disclosed herein.

### Hematopoietic Stem Cells for Cancer Immunotherapy

[0205] In some embodiments, hematopoietic stem cells (HSCs) are used in the methods of immunotherapy disclosed herein. In several embodiments, the cells are engineered to express a homing moiety and/or a cytotoxic receptor complex. In several embodiments, the cells are engineered to express a cytotoxic receptor complex. HSCs are used, in several embodiments, to leverage their ability to engraft for long-term blood cell production, which could result in a sustained source of targeted anti-cancer effector cells, for example to combat cancer remissions. In several embodiments, this ongoing production helps to offset anergy or exhaustion of other cell types, for example due to the tumor microenvironment.

[0206] In some embodiments, a HSC is positive for cell surface expression of a marker selected from among the group consisting of CD34, CD59, and CD90. In some embodiments, a HSC is positive for cell surface expression of CD34. In some embodiments, a HSC is positive for cell surface expression of CD59. In some embodiments, a HSC is positive for cell surface expression of CD90.

[0207] In several embodiments allogeneic HSCs are used, while in some embodiments, autologous HSCs are used. In several embodiments, HSCs are used in combination with one or more additional engineered cell type disclosed herein. Some embodiments of the methods and compositions described herein relate to a stem cell, such as a hematopoietic stem cell engineered to express a CAR that targets a tumor marker, for example, CD19, CD123, CD70, Her2, mesothelin, Claudin 6, BCMA, EGFR, among any of the others disclosed herein, and optionally a membrane-bound interleukin 15 (mbIL15) domain. Several embodiments of the methods and compositions disclosed herein relate to hematopoietic stem cells engineered to express an activating chimeric receptor that targets a ligand on a tumor cell, for example, MICA, MICB, ULBP1, ULBP2, ULBP3, ULBP4. ULBP5, and ULBP6 (among others) and optionally a membrane-bound interleukin 15 (mbIL15) domain.

### Induced Pluripotent Stem Cells

[0208] In some embodiments, immune cells are derived (differentiated) from pluripotent stem cells (PSCs). In some embodiments, immune cells (e.g., NK and/or T cells) derived from induced pluripotent stem cells (iPSCs) are used in the method of immunotherapy disclosed herein. For example, in some embodiments, NK cells are derived from iPSCs. In some embodiments, induced pluripotent stem cells (iPSCs) are used in the method of immunotherapy disclosed herein. iPSCs are used, in several embodiments, to leverage their ability to differentiate and derive into non-pluripotent cells, including, but not limited to, CD34 cells, hemogenic endothelium cells, HSCs (hematopoietic stem and progenitor cells), hematopoietic multipotent progenitor cells, T cell progenitors, NK cell progenitors, T cells, NKT cells, NK cells, and B cells comprising one or several genetic modifications at selected sites through differentiating iPSCs or less differentiated cells comprising the same genetic modifications at the same selected sites. In several embodiments, the iPSCs are used to generate iPSC-derived NK or T cells. In several embodiments, the iPSCs are used to generate iPSC-derived NK cells. In several embodiments, the iPSCs are used to generate iPSC-derived T cells.

[0209] In several embodiments, the cells are engineered to express a homing moiety and/or a cytotoxic receptor complex In several embodiments, the cells are engineered to express a cytotoxic receptor complex. In several embodiments, iPSCs are used in combination with one or more additional engineered cell type disclosed herein.

[0210] Several embodiments of the methods and compositions disclosed herein relate to induced pluripotent stem cells engineered to express an activating chimeric receptor that targets a ligand on a tumor cell, for example, CD19, CD123, CD70, Her2, mesothelin, Claudin 6, BCMA, or EGFR. In some embodiments, the iPSCs engineered to express a chimeric receptor are engineered to also express (e.g., bicistronically express) a membrane-hound interleukin 15 (mbIL15) domain. Some embodiments of the methods and compositions described herein relate to a stem cell, such as an induced pluripotent stem cell engineered to express a CAR that targets a tumor marker, for example, CD19, CD123, CD70, Her2, mesothelin, Claudin 6, BCMA, EGFR, among any of the others disclosed herein, and optionally a membrane-bound interleukin 15 (mbIL15) domain.

[0211] Several embodiments of the methods and compositions disclosed herein relate to induced pluripotent stem cells engineered to express an activating chimeric receptor that targets a ligand on a tumor cell, for example, MICA, MICB, ULBP1, ULBP2, ULBP3, ULBP4, ULBP5, and ULBP6 (among others). In some embodiments, the iPSCs engineered to express a chimeric receptor are engineered to also express (e.g., bicistronically express) a membrane-bound interleukin 15 (mbIL15) domain. Several embodiments of the methods and compositions disclosed herein relate to induced pluripotent stem cells engineered to express an activating chimeric receptor that targets a ligand on a tumor cell, for example, MICA, MICB. ULBP1, ULBP2, ULBP3, ULBP4, ULBP5, and ULBP6 (among others) and optionally a membrane-bound interleukin 15 (mbIL15) domain.

[0212] In several embodiments, the engineered iPSCs are differentiated into NK, T, or other immune cells, such as for use in a composition or method provided herein. In several embodiments, the engineered iPSCs are differentiated into NK cells. In several embodiments, the engineered iPSCs are differentiated into T cells. In several embodiments, the engineered iPSCs are differentiated into NK and T cells.

### Genetic Editing of Immune Cells

[0213] As discussed above, a variety of cell types can be utilized in cellular immunotherapy. Further, as elaborated on in more detail below, and shown in the Examples, genetic modifications can be made to these cells in order to enhance one or more aspects of their efficacy (e.g., cytotoxicity) and/or persistence (e.g., active life span). As discussed herein, in several embodiments NK cells are used for immunotherapy. In several embodiments provided for herein, gene editing of the NK cell can advantageously impart to the edited NK cell the ability to resist and/or overcome various inhibitory signals that are generated in the tumor microenvironment. It is known that tumors generate a variety of signaling molecules that are intended to reduce the anti-tumor effects of immune cells. As discussed in more detail below, in several embodiments, gene editing of the NK cell limits this tumor microenvironment suppressive effect on the NK cells, T cells, combinations of NK and T cells, or any edited/engineered immune cell provided for herein.

[0214] As discussed below, in several embodiments, gene editing is employed to reduce or knockout expression of target proteins, for example by disrupting the underlying gene encoding the protein.

[0215] In several embodiments, gene editing can reduce transcription of a target gene by about 30%, about 40%, about 50%, about 60%, about 70%, about 75%, about 80%, about 85%, about 90%, about 95%, about 97%, about 98%, about 99%, or more (including any amount between those listed). In several embodiments, gene editing reduces transcription of a target gene by at least about 30%. In several embodiments, gene editing reduces transcription of a target gene by at least about 40%. In several embodiments, gene editing reduces transcription of a target gene by at least about 50%. In several embodiments, gene editing reduces transcription of a target gene by at least about 60%. In several embodiments, gene editing reduces transcription of a target gene by at least about 70%. In several embodiments, gene editing reduces transcription of a target gene by at least about 80%. In several embodiments, gene editing reduces transcription of a target gene by at least about 90%. In several embodiments, the gene is completely knocked out, such that transcription of the target gene is undetectable.

[0216] In several embodiments, gene editing can reduce expression of a target protein by about 30%, about 40%, about 50%, about 60%, about 70%, about 75%, about 80%, about 85%, about 90%, about 95%, about 97%, about 98%, about 99%, or more (including any amount between those listed). In several embodiments, gene editing reduces expression of a target protein by at least about 30%. In several embodiments, gene editing reduces expression of a target protein by at least about 40%. In several embodiments, gene editing reduces expression of a target protein by at least about 50%. In several embodiments, gene editing reduces expression of a target protein by at least about 60%. In several embodiments, gene editing reduces expression of a target protein by at least about 70%. In several embodiments, gene editing reduces expression of a target protein by at least about 80%. In several embodiments, gene editing reduces expression of a target protein by at least about 90%. In several embodiments, the gene is completely knocked out, such that expression of the target protein is undetectable.

[0217] In several embodiments, gene editing is used to “knock in” or otherwise increase transcription of a target gene. In several embodiments, transcription of a target gene is increased by about 30%, about 40%, about 50%, about 60%, about 70%, about 75%, about 80%, about 85%, about 90%, about 95%, about 97%, about 98%, about 99%, or more (including any amount between those listed). In several embodiments, transcription of a target gene is increased by at least about 30%. In several embodiments, transcription of a target gene is increased by at least about 40%. In several embodiments, transcription of a target gene is increased by at least about 50%. In several embodiments, transcription of a target gene is increased by at least about 60%. In several embodiments, transcription of a target gene is increased by at least about 70%. In several embodiments, transcription of a target gene is increased by at least about 80%. In several embodiments, transcription of a target gene is increased by at least about 90%. In several embodiments, transcription of a target gene is increased by at least about 100%.

[0218] In several embodiments, gene editing is used to “knock in” or otherwise enhance expression of a target protein. In several embodiments, expression of a target protein can be enhanced by about 30%, about 40%, about 50%, about 60%, about 70%, about 75%, about 80%, about 85%, about 90%, about 95%, about 97%, about 98%, about 99%, or more (including any amount between those listed). In several embodiments, expression of a target protein is increased by at least about 30%. In several embodiments, expression of a target protein is increased by at least about 40%. In several embodiments, expression of a target protein is increased by at least about 50%. In several embodiments, expression of a target protein is increased by at least about 60%. In several embodiments, expression of a target protein is increased by at least about 70%. In several embodiments, expression of a target protein is increased by at least about 80%. In several embodiments, expression of a target protein is increased by at least about 90%. In several embodiments, expression of a target protein is increased by at least about 100%.

[0219] Unless indicated otherwise to the contrary, the sequences provided for guide RNAs (gRNAs) that are recited using deoxyribonucleotides refer to the target DNA sequence (which is complementary to the corresponding non-target DNA sequence to which the gRNA binds) and shall be considered as also referencing those guides used in practice (e.g., employing ribonucleotides, where the ribonucleotide uracil is used in lieu of deoxyribonucleotide thymine or vice-versa where thymine is used in lieu of uracil, wherein both are complementary base pairs to adenine when reciting either an RNA or DNA sequence). In other words, the sequences provided for particular gRNAs provided herein are identical to the gRNA sequences used in practice, except that the gRNA sequences include uracil in lieu of thymine. For example, a gRNA with the sequence ATGCTCAATGCGTC (SEQ ID NO:977) shall also refer to the following sequence AUGCUCAAUGCGUC (SEQ ID NO:978) or a gRNA with sequence AUGCUCAAUGCGUC (SEQ ID NO:978) shall also refer to the following sequence ATGCTCAATGCGTC (SEQ ID NO:977). Further, the non-target DNA sequence to which a particular gRNA sequence binds is complementary to the sequence of the particular gRNA. For example, a gRNA with the provided sequence of ATGCTCAATGCGTC (SEQ ID NO: 977) binds to a non-target DNA sequence of TACGAGTTACGCAG (SEQ ID NO: 979). In this situation, the corresponding target DNA sequence, which is complementary to the non-target DNA sequence, is ATGCTCAATGCGTC (SEQ ID NO: 977).

[0220] In several embodiments, gene editing of the immune cells can also provide unexpected enhancement in the expansion, persistence and/or cytotoxicity of the edited immune cell. As disclosed herein, engineered cells (e.g., those expressing a CAR) may also be edited, the combination of which provides for a robust cell for immunotherapy. In several embodiments, the edits allow for unexpectedly improved NK cell expansion, persistence and/or cytotoxicity. In several embodiments, knockout of gene expression in NK cells removes a potent negative regulator or other suppressor of signaling and/or activity of NK cells, thereby disinhibiting the NK cells and allowing for one or more of enhanced NK cell homing, NK cell migration, activation of NK cells, expansion, cytotoxicity and/or persistence. Additionally, in several embodiments, the editing can enhance NK and/or T cell function in the otherwise suppressive tumor microenvironment.

[0221] In several embodiments, genetic editing (whether knock out or knock in) of any of the target genes disclosed herein, is accomplished through targeted introduction of DNA breakage, and a subsequent DNA repair mechanism. In several embodiments, double strand breaks of DNA are repaired by non-homologous end joining (NHEJ), wherein enzymes are used to directly join the DNA ends to one another to repair the break. NHEJ is an error-prone process. In general, in the absence of a repair template, the NHEJ process re-ligates the ends of the cleaved DNA strands, which frequently results in nucleotide deletions and insertions at the cleavage site. In several embodiments, however, double strand breaks (DSB) are repaired by homology directed repair (HDR), which is advantageously more accurate, thereby allowing sequence specific breaks and repair. HDR uses a homologous sequence as a template for regeneration of missing DNA sequences at the break point, such as a vector with the desired genetic elements (e.g., an insertion element to disrupt the coding sequence of a gene) within a sequence that is homologous to the flanking sequences of a double strand break. This will result in the desired change (e.g., insertion) being inserted at the site of the DSB. The HDR pathway can occur by way of the canonical HDR pathway or the alternative HDR pathway. Unless otherwise indicated, the term “HDR” or “homology-directed repair” as used herein encompasses both canonical HDR and alternative HDR.

[0222] Canonical HDR or “canonical homology-directed repair” or cHDR,” are used interchangeably, and refers to the process of repairing DNA damage using a homologous nucleic acid (e.g., an endogenous homologous sequence, such as a sister chromatid; or an exogenous nucleic acid, such as a donor template). Canonical HDR typically acts when there has been a significant resection at the DSB, forming at least one single-stranded portion of DNA. In a normal cell, canonical HDR typically involves a series of steps such as recognition of the break, stabilization of the break, resection, stabilization of single-stranded DNA, formation of a DNA crossover intermediate, resolution of the crossover intermediate, and ligation. The canonical HDR process requires RAD51 and BRCA2, and the homologous nucleic acid, e.g., repair template, is typically double-stranded. In canonical HDR, a double-stranded polynucleotide, e.g., a double-stranded repair template, is introduced, which comprises a sequence that is homologous to the targeting sequence, and which will either be directly integrated into the targeting sequence or will be used as a template to insert the sequence, or a portion the sequence, of the repair template into the target gene. After resection at the break, repair can progress by different pathways, e.g., by the double Holliday junction model (also referred to as the double strand break repair, or DSBR, pathway), or by the synthesis-dependent strand annealing (SDSA) pathway.

[0223] In the double Holliday junction model, strand invasion occurs by the two single stranded overhangs of the targeting sequence to the homologous sequences in the double-stranded polynucleotide, e.g., double stranded donor template, which results in the formation of an intermediate with two Holliday junctions. The junctions migrate as new DNA is synthesized from the ends of the invading strand to fill the gap resulting from the resection. The end of the newly synthesized DNA is ligated to the resected end, and the junctions are resolved, resulting in the insertion at the targeting sequence, or a portion of the targeting sequence that includes the gene variant. Crossover with the polynucleotide, e.g., repair template, may occur upon resolution of the junctions.

[0224] In the SDSA pathway, only one single stranded overhang invades the polynucleotide, e.g., donor template, and new DNA is synthesized from the end of the invading strand to fill the gap resulting from resection. The newly synthesized DNA then anneals to the remaining single stranded overhang, new DNA is synthesized to fill in the gap, and the strands are ligated to produce the modified DNA duplex.

[0225] Alternative HDR, or “alternative homology-directed repair,” or “alternative HDR,” are used interchangeably, and refers, in some embodiments, to the process of repairing DNA damage using a homologous nucleic acid (e.g., an endogenous homologous sequence, such as a sister chromatid; or an exogenous nucleic acid, such as a repair template). Alternative HDR is distinct from canonical HDR in that the process utilizes different pathways from canonical HDR, and can be inhibited by the canonical HDR mediators, RAD51 and BRCA2. Moreover, alternative HDR is also distinguished by the involvement of a single-stranded or nicked homologous nucleic acid template, e.g., repair template, whereas canonical HDR generally involves a double-stranded homologous template. In the alternative HDR pathway, a single strand template polynucleotide, e.g., repair template, is introduced. A nick, single strand break, or DSB at the cleavage site, for altering a desired target site, e.g., a gene variant in a target gene, is mediated by a nuclease molecule, and resection at the break occurs to reveal single stranded overhangs. Incorporation of the sequence of the template polynucleotide, e.g., repair template, to alter the target site of the DNA typically occurs by the SDSA pathway, as described herein. In some embodiments, HDR is carried out by introducing, into a cell, one or more agent(s) capable of inducing a DSB, and a repair template, e.g., a single-stranded oligonucleotide. The introducing can be carried out by any suitable delivery. The conditions under which HDR is allowed to occur can be any conditions suitable for carrying out HDR in a cell.

[0226] In several embodiments, gene editing is accomplished by one or more of a variety of engineered nucleases. In several embodiments, restriction enzymes are used, particularly when double strand breaks are desired at multiple regions. In several embodiments, a bioengineered nuclease is used. Depending on the embodiment, one or more of a Zinc Finger Nuclease (ZFN), transcription-activator like effector nuclease (TALEN), meganuclease and/or clustered regularly interspaced short palindromic repeats (CRISPR/Cas9) system are used to specifically edit the genes encoding one or more of the TCR subunits.

[0227] Meganucleases are characterized by their capacity to recognize and cut large DNA sequences (from 14 to 40 base pairs). In several embodiments, a meganuclease from the LAGLIDADG family is used, and is subjected to mutagenesis and screening to generate a meganuclease variant that recognizes a unique sequence(s), such as a specific site in a TCR subunit (e.g., TRAC), or CISH, or any other target gene disclosed herein. Target sites in a TCR subunit can readily be identified. Further information of target sites within a region of the TCR can be found in US Patent Publication No. 2018/0325955, and US Patent Publication No. 2015/0017136, each of which is incorporated by reference herein in its entirety. In several embodiments, two or more meganucleases, or functions fragments thereof, are fused to create a hybrid enzyme that recognize a desired target sequence within the target gene (e.g., CISH).

[0228] In contrast to meganucleases, ZFNs and TALEN function based on a non-specific DNA cutting catalytic domain which is linked to specific DNA sequence recognizing peptides such as zinc fingers or transcription activator-like effectors (TALEs). Advantageously, the ZFNs and TALENs thus allow sequence-independent cleavage of DNA, with a high degree of sequence-specificity in target recognition. Zinc finger motifs naturally function in transcription factors to recognize specific DNA sequences for transcription. The C-terminal part of each finger is responsible for the specific recognition of the DNA sequence. While the sequences recognized by ZFNs are relatively short, (e.g., ˜3 base pairs), in several embodiments, combinations of 2, 3, 4, 5, 6, 7, 8, 9, 10 or more zinc fingers whose recognition sites have been characterized are used, thereby allowing targeting of specific sequences, such as a portion of the TCR (or an immune checkpoint). The combined ZFNs are then fused with the catalytic domain(s) of an endonuclease, such as FokI (optionally a FokI heterodimer), in order to induce a targeted DNA break. Additional information on uses of ZFNs to edit a TCR subunit and/or immune checkpoints can be found in U.S. Pat. No. 9,597,357, which is incorporated by reference herein.

[0229] Transcription activator-like effector nucleases (TALENs) are specific DNA-binding proteins that feature an array of 33 or 34-amino acid repeats. Like ZFNs, TALENs are a fusion of a DNA cutting domain of a nuclease to TALE domains, which allow for sequence-independent introduction of double stranded DNA breaks with highly precise target site recognition. TALENs can create double strand breaks at the target site that can be repaired by error-prone non-homologous end-joining (NHEJ), resulting in gene disruptions through the introduction of small insertions or deletions. Advantageously, TALENs are used in several embodiments, at least in part due to their higher specificity in DNA binding, reduced off-target effects, and ease in construction of the DNA-binding domain.

[0230] CRISPRs (Clustered Regularly Interspaced Short Palindromic Repeats) are genetic elements that bacteria use as protection against viruses. The repeats are short sequences that originate from viral genomes and have been incorporated into the bacterial genome. Cas (CRISPR associated proteins) process these sequences and cut matching viral DNA sequences. By introducing plasmids containing Cas genes and specifically constructed CRISPRs into eukaryotic cells, the eukaryotic genome can be cut at any desired position. Additional information on CRISPR can be found in US Patent Publication No. 2014/0068797, which is incorporated by reference herein. In several embodiments, CRISPR is used to manipulate the gene(s) encoding a target gene to be knocked out or knocked in, for example CISH, TGFBR2, TCR, B2M, CIITA, CD47, HLA-E, etc. In several embodiments, CRISPR is used to edit one or more of the TCRs of a T cell and/or the genes encoding one or more immune checkpoints. In several embodiments, the immune checkpoint is selected from one or more of CTLA4 and PD1. In several embodiments, CRISPR is used to truncate one or more of TCRα, TCRβ, TCRγ, and TCRδ. In several embodiments, a TCR is truncated without impacting the function of the CD3z signaling domain of the TCR.

[0231] Depending on the embodiment and which target gene is to be edited, a Class 1 or Class 2 Cas is used. In several embodiments, a Class 1 Cas is used and the Cas type is selected from the following types: I, IA, IB, IC, ID, IE, IF, IU, III, IIIA, IIIB, IIIC, HID, IV IVA, IVB, and combinations thereof. In several embodiments, the Cas is selected from the group consisting of Cas3, Cas8a, Cas5, Cas8b, Cas8c, Cas10d, Cse1, Cse2, Csy1, Csy2, Csy3, GSU0054, Cas10, Csm2, Cmr5, Cas10, Csx11, Csx10, Csf1, and combinations thereof. In several embodiments, a Class 2 Cas is used and the Cas type is selected from the following types: II, IIA, IIB, IIC, V, VI, and combinations thereof. In several embodiments, the Cas is selected from the group consisting of Cas9, Csn2, Cas4, Cas12a (previously known as Cpf1), C2c1, C2c3, Cas13a (previously known as C2c2), Cas13b, Cas13c, CasX, CasY and combinations thereof. In some embodiments, the Cas is Cas9. In some embodiments, class 2 CasX is used, wherein CasX is capable of forming a complex with a guide nucleic acid and wherein the complex can bind to a target DNA, and wherein the target DNA comprises a non-target strand and a target strand. In some embodiments, class 2 CasY is used, wherein CasY is capable of binding and modifying a target nucleic acid and/or a polypeptide associated with target nucleic acid.

### Targets for Gene Editing

[0232] As discussed above, gene editing can be used to disrupt a target gene (or genes) in order to enhance the functionality (e.g., expandability, cytotoxicity) or persistence (lifespan or ability to resist hypoxia) of immune cells, such as NK cells. In some embodiments, immune cells are genetically edited at ADAM17, HIF-1a, DGKz, GSK-3B, LAG3, TIM3, TRIM29, IL-1R8, CD38, FBP-1, INSIG1, MED12, MED13, CCNC, CDK8, ID3, SOX4, or any combination thereof. In some embodiments, immune cells are genetically edited at ADAM17, HIF-1a, DGKz, GSK-3B, LAG3, TIM3, TRIM29, IL-1R8, CD38, FBP-1, INSIG1, MED12, MED13, CCNC, CDK8, CBLB, CISH, ID3, SOX4, or any combination thereof.

[0233] By way of non-limiting example, in several embodiments, a disintegrin and metalloprotease domain (ADAM) family member, in particular embodiments ADAM17, is a target of gene editing. ADAM17, located on chromosome 2, is implicated in antibody-dependent cell-mediated cytotoxicity (ADCC), which is a key mechanism of action in anti-tumor responses. CD16A is a membrane-bound protein expressed by NK cells and a receptor for the Fc portion of IgGs. While engagement of CD16A (e.g., by antibody-coated target cells) triggers NK cell-mediated ADCC, CD16A is rapidly downregulated after NK cell activation by cleavage from the NK cell surface (either in vivo or in vitro, for example by PMA). ADAM17 is believed to be the primary protease responsible for cleavage of CD16A from the NK cell surface; inhibition of ADAM17 (such as by disruption in ADAM17 expression) reduces, ameliorates, or otherwise inhibits the cleavage of CD16A, which allows ADCC to continue as an operative anti-tumor pathway (Wu et al., J Leukoc Biol (2019) 105(6):1297-1303). Moreover, CD62 ligand (CD62L) is a substrate of ADAM17, and the disruption of expression of ADAM17 functions, in several embodiments, to stabilize CD62L expression. CD62L, an L-selectin molecule mediates homing of leukocytes to lymphoid organs. CD56dimCD62L+ cells represent a unique subset of mature, polyfunctional NK cells that affect the magnitude of the local NK cell response, in particular, by the ability to produce IFN-γ after cytokine stimulation, proliferate in vivo during viral infection, and kill target cells upon engagement of activating receptors. Thus, stabilizing CD62L may, in several embodiments, further enhance NK cell function.

[0234] In several embodiments, gene editing reduces transcription of ADAM17 by about 30%, about 40%, about 50%, about 60%, about 70%, about 75%, about 80%, about 85%, about 90%, about 95%, about 97%, about 98%, about 99%, or more (including any amount between those listed). In several embodiments, gene editing reduces transcription of ADAM17 by at least about 30%, In several embodiments, gene editing reduces transcription of ADAM17 by at least about 40%, In several embodiments, gene editing reduces transcription of ADAM17 by at least about 50%, In several embodiments, gene editing reduces transcription of ADAM17 by at least about 60%, In several embodiments, gene editing reduces transcription of ADAM17 by at least about 70%, In several embodiments, gene editing reduces transcription of ADAM17 by at least about 80%, In several embodiments, gene editing reduces transcription of ADAM17 by at least about 90%.

[0235] In several embodiments, gene editing can reduce expression of a target protein by about 30%, about 40%, about 50%, about 60%, about 70%, about 75%, about 80%, about 85%, about 90%, about 95%, about 97%, about 98%, about 99%, or more (including any amount between those listed). In several embodiments, gene editing reduces expression of ADAM17 by about 30%, about 40%, about 50%, about 60%, about 70%, about 75%, about 80%, about 85%, about 90%, about 95%, about 97%, about 98%, about 99%, or more (including any amount between those listed). In several embodiments, gene editing reduces expression of ADAM17 by at least about 30%, In several embodiments, gene editing reduces expression of ADAM17 by at least about 40%, In several embodiments, gene editing reduces expression of ADAM17 by at least about 50%, In several embodiments, gene editing reduces expression of ADAM17 by at least about 60%, In several embodiments, gene editing reduces expression of ADAM17 by at least about 70%, In several embodiments, gene editing reduces expression of ADAM17 by at least about 80%, In several embodiments, gene editing reduces expression of ADAM17 by at least about 90%.

[0236] In several embodiments, a guide RNA (gRNA) comprising the sequence of any of SEQ ID NOS:682-687 is used to disrupt (e.g., reduce expression of) the ADAM17 gene.

[0237] In several embodiments, Hypoxia Inducible Factor 1 alpha (HIF1a) is a target of gene editing. HIF1a, which is located on chromosome 15 is a transcriptional activator of CD274 (also known as PDL1). When hypoxic conditions exist, HIF1a interacts with a hypoxia response element in the promoter of PDL1, which then drives increased PDL1 expression. This upregulation of PDL1 expression on various cells, including tumor cells, immune cells (including MDSCs, macrophages, DCs, and bone marrow-derived macrophages (BMDMs)), and other cells in the TME, serves to inhibit the ability of T cells and/or NK cells to kill the tumor through the binding of PD1 to PDL1. Studies using single-cell RNA sequencing of tumor-infiltrating NK cells revealed that inhibition of HIF1a promoted tumor-infiltrating NK cell activity (Ni et al., Immunity (2020) 52(6):1075-87). In some embodiments, loss of HIF1a in NK cells inhibits tumor growth through, for example, stimulation of non-productive angiogenesis (e.g., such that the tumor cell is starved of blood supply).

[0238] In several embodiments, gene editing reduces transcription of HIF1A by about 30%, about 40%, about 50%, about 60%, about 70%, about 75%, about 80%, about 85%, about 90%, about 95%, about 97%, about 98%, about 99%, or more (including any amount between those listed). In several embodiments, gene editing reduces transcription of HIF1A by at least about 30%, In several embodiments, gene editing reduces transcription of HIF1A by at least about 40%, In several embodiments, gene editing reduces transcription of HIF1A by at least about 50%, In several embodiments, gene editing reduces transcription of HIF1A by at least about 60%, In several embodiments, gene editing reduces transcription of HIF1A by at least about 70%, In several embodiments, gene editing reduces transcription of HIF1A by at least about 80%, In several embodiments, gene editing reduces transcription of HIF1A by at least about 90%.

[0239] In several embodiments, gene editing can reduce expression of a target protein by about 30%, about 40%, about 50%, about 60%, about 70%, about 75%, about 80%, about 85%, about 90%, about 95%, about 97%, about 98%, about 99%, or more (including any amount between those listed). In several embodiments, gene editing reduces expression of HIF1A by about 30%, about 40%, about 50%, about 60%, about 70%, about 75%, about 80%, about 85%, about 90%, about 95%, about 97%, about 98%, about 99%, or more (including any amount between those listed). In several embodiments, gene editing reduces expression of HIF1A by at least about 30%, In several embodiments, gene editing reduces expression of HIF1A by at least about 40%, In several embodiments, gene editing reduces expression of HIF1A by at least about 50%, In several embodiments, gene editing reduces expression of HIF1A by at least about 60%, In several embodiments, gene editing reduces expression of HIF1A by at least about 70%, In several embodiments, gene editing reduces expression of HIF1A by at least about 80%, In several embodiments, gene editing reduces expression of HIF1A by at least about 90%.

[0240] In several embodiments, a guide RNA (gRNA) comprising the sequence of any of SEQ ID NOS:750-760 is used to disrupt (e.g., reduce expression of) the HIF1A gene.

[0241] By way of non-limiting example, Diacylglycerol Kinase Zeta (DGKz) is targeted for genetic editing to reduce to knock out expression. DGKz is located on chromosome 11 and is a negative regulator of diacylglycerol kinase mediated signaling. Mice lacking DGKz have been shown in studies to show increase cytokine production and degranulation, in some instances in a ERK-dependent (also known as Ras-Ref-MEK-ERK pathway) manner. Additionally, CRISPR/Cas9-mediated knock out of DGK can improve the function (e.g., antitumor activities) of T cells. However, in NK cells DGKz disruption is believed to be particularly beneficial because, according to some embodiment, disruption of DGKz does not negatively impact inhibitory NK cell receptor expression or function, thereby maintaining in several respects the natural balance of NK activating and inhibitory signals that regulate NK cell activity (Singh and Kambayashi, Front Cell Dev Bio (2016) 4:96). Thus, enhancement of function of NK cells is achieved, in several embodiments, through enhancing NK cell activity and signaling by disinhibiting a negative regulating aspect of an activating pathway rather than by disrupting the “brake” of NK cell function, inhibitory NK cells receptor expression or function, which could lead to unchecked NK cell activity and potential off-target cytotoxicity.

[0242] In several embodiments, gene editing reduces transcription of DGKZ by about 30%, about 40%, about 50%, about 60%, about 70%, about 75%, about 80%, about 85%, about 90%, about 95%, about 97%, about 98%, about 99%, or more (including any amount between those listed). In several embodiments, gene editing reduces transcription of DGKZ by at least about 30%, In several embodiments, gene editing reduces transcription of DGKZ by at least about 40%, In several embodiments, gene editing reduces transcription of DGKZ by at least about 50%, In several embodiments, gene editing reduces transcription of DGKZ by at least about 60%, In several embodiments, gene editing reduces transcription of DGKZ by at least about 70%, In several embodiments, gene editing reduces transcription of DGKZ by at least about 80%, In several embodiments, gene editing reduces transcription of DGKZ by at least about 90%.

[0243] In several embodiments, gene editing can reduce expression of a target protein by about 30%, about 40%, about 50%, about 60%, about 70%, about 75%, about 80%, about 85%, about 90%, about 95%, about 97%, about 98%, about 99%, or more (including any amount between those listed). In several embodiments, gene editing reduces expression of DGKZ by about 30%, about 40%, about 50%, about 60%, about 70%, about 75%, about 80%, about 85%, about 90%, about 95%, about 97%, about 98%, about 99%, or more (including any amount between those listed). In several embodiments, gene editing reduces expression of DGKZ by at least about 30%, In several embodiments, gene editing reduces expression of DGKZ by at least about 40%, In several embodiments, gene editing reduces expression of DGKZ by at least about 50%, In several embodiments, gene editing reduces expression of DGKZ by at least about 60%, In several embodiments, gene editing reduces expression of DGKZ by at least about 70%, In several embodiments, gene editing reduces expression of DGKZ by at least about 80%, In several embodiments, gene editing reduces expression of DGKZ by at least about 90%.

[0244] In several embodiments, a guide RNA (gRNA) comprising the sequence of any of SEQ ID NOS:688-723 is used to disrupt (e.g., reduce expression of) the DGKZ gene.

[0245] In several embodiments, Glycogen Synthase Kinase-3 beta (GSK3B) is a target of gene editing. GSK3B, located on chromosome 11, is a ubiquitously expressed serine/threonine kinase which is involved in a variety of cellular functions, including differentiation, survival, glycogen metabolism, protein synthesis, immune responses, and cell death, among others. In AML patients, repression of GSK3B is believed to restore NK cell cytotoxicity. Moreover, GSK3B inhibition (e.g., by small molecule inhibitor) can drive NK cell maturation and in some embodiments, enhance anti-tumor activity (Cichocki et al., Cancer Res (2017) 77(20):5664-75). Normal levels of GSK3B are thought to negatively regulated several aspects of NK cell function, including those functions triggered by one or more (e.g., combinations) of activating NK cell receptors. Returning to small molecule effects, small molecule inhibitors of GSK3B can specifically inhibit transcription of inhibitory co-receptor LAG-3 (Rudd et al., Cell Rep (2020) 30(7):2075-82; discussed in more detail below).

[0246] In several embodiments, gene editing reduces transcription of GSK3B by about 30%, about 40%, about 50%, about 60%, about 70%, about 75%, about 80%, about 85%, about 90%, about 95%, about 97%, about 98%, about 99%, or more (including any amount between those listed). In several embodiments, gene editing reduces transcription of GSK3B by at least about 30%, In several embodiments, gene editing reduces transcription of GSK3B by at least about 40%, In several embodiments, gene editing reduces transcription of GSK3B by at least about 50%, In several embodiments, gene editing reduces transcription of GSK3B by at least about 60%, In several embodiments, gene editing reduces transcription of GSK3B by at least about 70%, In several embodiments, gene editing reduces transcription of GSK3B by at least about 80%, In several embodiments, gene editing reduces transcription of GSK3B by at least about 90%.

[0247] In several embodiments, gene editing can reduce expression of a target protein by about 30%, about 40%, about 50%, about 60%, about 70%, about 75%, about 80%, about 85%, about 90%, about 95%, about 97%, about 98%, about 99%, or more (including any amount between those listed). In several embodiments, gene editing reduces expression of GSK3B by about 30%, about 40%, about 50%, about 60%, about 70%, about 75%, about 80%, about 85%, about 90%, about 95%, about 97%, about 98%, about 99%, or more (including any amount between those listed). In several embodiments, gene editing reduces expression of GSK3B by at least about 30%, In several embodiments, gene editing reduces expression of GSK3B by at least about 40%, In several embodiments, gene editing reduces expression of GSK3B by at least about 50%, In several embodiments, gene editing reduces expression of GSK3B by at least about 60%, In several embodiments, gene editing reduces expression of GSK3B by at least about 70%, In several embodiments, gene editing reduces expression of GSK3B by at least about 80%, In several embodiments, gene editing reduces expression of GSK3B by at least about 90%.

[0248] In several embodiments, a guide RNA (gRNA) comprising the sequence of any of SEQ ID NOS:724-749 is used to disrupt (e.g., reduce expression of) the GSK3B gene.

[0249] In several embodiments, lymphocyte activation gene 3 (LAG3), is a target of gene editing. LAG3, which is located on chromosome 12, operates as an immune checkpoint and inhibits the activation of its host cell (such as NK and/or T cells) and generally promotes a more suppressive immune response. For example, on T cells, LAG3 reduces cytokine and granzyme production, and proliferation, all while encouraging differentiation into T regulatory cells rather than cytotoxic cells. LAG3 functions in NK cells as a checkpoint to reduce cytokine production by CD56+Dim cytotoxic cells.

[0250] In several embodiments, gene editing reduces transcription of LAG3 by about 30%, about 40%, about 50%, about 60%, about 70%, about 75%, about 80%, about 85%, about 90%, about 95%, about 97%, about 98%, about 99%, or more (including any amount between those listed). In several embodiments, gene editing reduces transcription of LAG3 by at least about 30%, In several embodiments, gene editing reduces transcription of LAG3 by at least about 40%, In several embodiments, gene editing reduces transcription of LAG3 by at least about 50%, In several embodiments, gene editing reduces transcription of LAG3 by at least about 60%, In several embodiments, gene editing reduces transcription of LAG3 by at least about 70%, In several embodiments, gene editing reduces transcription of LAG3 by at least about 80%, In several embodiments, gene editing reduces transcription of LAG3 by at least about 90%.

[0251] In several embodiments, gene editing can reduce expression of a target protein by about 30%, about 40%, about 50%, about 60%, about 70%, about 75%, about 80%, about 85%, about 90%, about 95%, about 97%, about 98%, about 99%, or more (including any amount between those listed). In several embodiments, gene editing reduces expression of LAG3 by about 30%, about 40%, about 50%, about 60%, about 70%, about 75%, about 80%, about 85%, about 90%, about 95%, about 97%, about 98%, about 99%, or more (including any amount between those listed). In several embodiments, gene editing reduces expression of LAG3 by at least about 30%, In several embodiments, gene editing reduces expression of LAG3 by at least about 40%, In several embodiments, gene editing reduces expression of LAG3 by at least about 50%, In several embodiments, gene editing reduces expression of LAG3 by at least about 60%, In several embodiments, gene editing reduces expression of LAG3 by at least about 70%, In several embodiments, gene editing reduces expression of LAG3 by at least about 80%, In several embodiments, gene editing reduces expression of LAG3 by at least about 90%.

[0252] In several embodiments, a guide RNA (gRNA) comprising the sequence of any of SEQ ID NOS:761-789 is used to disrupt (e.g., reduce expression of) the LAG3 gene.

[0253] In several embodiments, T-cell immunoglobulin and mucin domain 3 (TIM3) is a target of gene editing. TIM3 is a receptor expressed on NK cells and is implicated as a marker of dysfunctional NK cells. TIM3 is an immune checkpoint and a member of the TIM family of proteins. TIM3 has multiple types of ligands, including CEACAM1, including CEACAM1, high-mobility group box 1 (HMGB1), phosphatidylserine (PtdSer). and Galectin-9 (Gal-9), which upon interaction with TIM3 can reduce cell signaling. Like LAG3 above, TIM3 is induced by hypoxia, such as exists in some areas of the tumor microenvironment (among other genes, including CTLA4, PD1, PDL1, CD47, and other immune checkpoints). In several embodiments, genetic disruption of TIM3 reduces the negative impact of the hypoxic TME and allows for enhance NK cell anti-tumor activity.

[0254] In several embodiments, gene editing reduces transcription of TIM3 by about 30%, about 40%, about 50%, about 60%, about 70%, about 75%, about 80%, about 85%, about 90%, about 95%, about 97%, about 98%, about 99%, or more (including any amount between those listed). In several embodiments, gene editing reduces transcription of TIM3 by at least about 30%, In several embodiments, gene editing reduces transcription of TIM3 by at least about 40%, In several embodiments, gene editing reduces transcription of TIM3 by at least about 50%, In several embodiments, gene editing reduces transcription of TIM 3 by at least about 60%, In several embodiments, gene editing reduces transcription of TIM 3 by at least about 70%, In several embodiments, gene editing reduces transcription of TIM3 by at least about 80%, In several embodiments, gene editing reduces transcription of TIM3 by at least about 90%.

[0255] In several embodiments, gene editing can reduce expression of a target protein by about 30%, about 40%, about 50%, about 60%, about 70%, about 75%, about 80%, about 85%, about 90%, about 95%, about 97%, about 98%, about 99%, or more (including any amount between those listed). In several embodiments, gene editing reduces expression of TIM3 by about 30%, about 40%, about 50%, about 60%, about 70%, about 75%, about 80%, about 85%, about 90%, about 95%, about 97%, about 98%, about 99%, or more (including any amount between those listed). In several embodiments, gene editing reduces expression of TIM3 by at least about 30%, In several embodiments, gene editing reduces expression of TIM3 by at least about 40%, In several embodiments, gene editing reduces expression of TIM3 by at least about 50%, In several embodiments, gene editing reduces expression of TIM3 by at least about 60%, In several embodiments, gene editing reduces expression of TIM3 by at least about 70%, In several embodiments, gene editing reduces expression of TIM3 by at least about 80%, In several embodiments, gene editing reduces expression of TIM3 by at least about 90%.

[0256] In several embodiments, a guide RNA (gRNA) comprising the sequence of any of SEQ ID NOS:790-825 is used to disrupt (e.g., reduce expression of) the TIM3 gene.

[0257] In several embodiments, Tripartite Motif Containing 29 (TRIM29) is a target of gene editing. TRIM29, located on chromosome 11, is a member of a family of proteins involved in many biological processes, including cell development, differentiation, apoptosis, and tumorigenesis. TRIM29 is induced in NK cells by IL-12 and IL-18, and due to its E3 ubiquitin ligase function, promotes proteasome-mediated degradation of various target genes, such as TAB2 (TGF-Beta Activated Kinase Binding Protein 2), which leads to an inhibition of IFN-g production by activated NK cells, thereby limiting their cytotoxicity (Dou et al., J Immunol (2019) 203(4):873-80). Deficiency of TRIM29 in NK cells, such as by gene editing, may lead in several embodiments, to markedly enhanced NK cell functions, even after IL-12 and IL-18 stimulation.

[0258] In several embodiments, gene editing reduces transcription of TRIM29 by about 30%, about 40%, about 50%, about 60%, about 70%, about 75%, about 80%, about 85%, about 90%, about 95%, about 97%, about 98%, about 99%, or more (including any amount between those listed). In several embodiments, gene editing reduces transcription of TRIM29 by at least about 30%, In several embodiments, gene editing reduces transcription of TRIM29 by at least about 40%, In several embodiments, gene editing reduces transcription of TRIM29 by at least about 50%, In several embodiments, gene editing reduces transcription of TRIM29 by at least about 60%, In several embodiments, gene editing reduces transcription of TRIM29 by at least about 70%, In several embodiments, gene editing reduces transcription of TRIM29 by at least about 80%, In several embodiments, gene editing reduces transcription of TRIM29 by at least about 90%.

[0259] In several embodiments, gene editing can reduce expression of a target protein by about 30%, about 40%, about 50%, about 60%, about 70%, about 75%, about 80%, about 85%, about 90%, about 95%, about 97%, about 98%, about 99%, or more (including any amount between those listed). In several embodiments, gene editing reduces expression of TRIM29 by about 30%, about 40%, about 50%, about 60%, about 70%, about 75%, about 80%, about 85%, about 90%, about 95%, about 97%, about 98%, about 99%, or more (including any amount between those listed). In several embodiments, gene editing reduces expression of TRIM29 by at least about 30%, In several embodiments, gene editing reduces expression of TRIM29 by at least about 40%, In several embodiments, gene editing reduces expression of TRIM29 by at least about 50%, In several embodiments, gene editing reduces expression of TRIM29 by at least about 60%, In several embodiments, gene editing reduces expression of TRIM29 by at least about 70%, In several embodiments, gene editing reduces expression of TRIM29 by at least about 80%, In several embodiments, gene editing reduces expression of TRIM29 by at least about 90%.

[0260] In several embodiments, a guide RNA (gRNA) comprising the sequence of any of SEQ ID NOS:826-835 is used to disrupt (e.g., reduce expression of) the TRIM29 gene.

[0261] In several embodiments, Interleukin-1 receptor 8 (IL-1R8) is a target of gene editing. IL-1R8, located on chromosome 11, is a member of the IL-1 receptor (ILR) family that acts as a negative regulator of ILR and Toll-like receptor (TLR) downstream signaling pathways and inflammation. IL-1R8 is the co-receptor of IL-1R5/IL-18Ra for IL-37. IL-1R8 is a checkpoint in NK cells that negative regulates anti-tumor and anti-viral activity.

[0262] In several embodiments, gene editing reduces transcription of IL-1R8 by about 30%, about 40%, about 50%, about 60%, about 70%, about 75%, about 80%, about 85%, about 90%, about 95%, about 97%, about 98%, about 99%, or more (including any amount between those listed). In several embodiments, gene editing reduces transcription of IL-1R8 by at least about 30%, In several embodiments, gene editing reduces transcription of IL-1R8 by at least about 40%, In several embodiments, gene editing reduces transcription of IL-1R8 by at least about 50%, In several embodiments, gene editing reduces transcription of IL-1R8 by at least about 60%, In several embodiments, gene editing reduces transcription of IL-1R8 by at least about 70%, In several embodiments, gene editing reduces transcription of IL-1R8 by at least about 80%, In several embodiments, gene editing reduces transcription of IL-1R8 by at least about 90%.

[0263] In several embodiments, gene editing can reduce expression of a target protein by about 30%, about 40%, about 50%, about 60%, about 70%, about 75%, about 80%, about 85%, about 90%, about 95%, about 97%, about 98%, about 99%, or more (including any amount between those listed). In several embodiments, gene editing reduces expression of IL-1R8 by about 30%, about 40%, about 50%, about 60%, about 70%, about 75%, about 80%, about 85%, about 90%, about 95%, about 97%, about 98%, about 99%, or more (including any amount between those listed). In several embodiments, gene editing reduces expression of IL-1R8 by at least about 30%, In several embodiments, gene editing reduces expression of IL-1R8 by at least about 40%, In several embodiments, gene editing reduces expression of IL-1R8 by at least about 50%, In several embodiments, gene editing reduces expression of IL-1R8 by at least about 60%, In several embodiments, gene editing reduces expression of IL-1R8 by at least about 70%, In several embodiments, gene editing reduces expression of IL-1R8 by at least about 80%, In several embodiments, gene editing reduces expression of IL-1R8 by at least about 90%.

[0264] In several embodiments, a guide RNA (gRNA) comprising the sequence of any of SEQ ID NOS:836-865 is used to disrupt (e.g., reduce expression of) the IL-1R8 gene.

[0265] In several embodiments, CD38 is a target of gene editing. CD38, located on chromosome 4, is an ectoenzyme with nicotinamide-adenine-dinucleotide-positive (NAD+) glycohydrolase and ADP-ribosyl cyclase activity. CD38 is also expressed on several tumor cells, such as multiple myeloma and acute myeloid leukemia cells. The function of CD38 and these glycohydrolase and cyclase activities result, in some instances of generation of the immunosuppressive molecule adenosine, which i) inhibits tumor cell lysis by T and NK cells, ii) induces M2 macrophages and tolerogenic dendritic cells (DC) and/or iii) induces Treg expansion. Moreover, the endogenous expression of CD38 can be problematic for therapeutic cell persistence, due to, for example fratricide if CD38-targeting CARs are used.

[0266] In several embodiments, gene editing reduces transcription of CD38 by about 30%, about 40%, about 50%, about 60%, about 70%, about 75%, about 80%, about 85%, about 90%, about 95%, about 97%, about 98%, about 99%, or more (including any amount between those listed). In several embodiments, gene editing reduces transcription of CD38 by at least about 30%, In several embodiments, gene editing reduces transcription of CD38 by at least about 40%, In several embodiments, gene editing reduces transcription of CD38 by at least about 50%, In several embodiments, gene editing reduces transcription of CD38 by at least about 60%, In several embodiments, gene editing reduces transcription of CD38 by at least about 70%, In several embodiments, gene editing reduces transcription of CD38 by at least about 80%, In several embodiments, gene editing reduces transcription of CD38 by at least about 90%.

[0267] In several embodiments, gene editing can reduce expression of a target protein by about 30%, about 40%, about 50%, about 60%, about 70%, about 75%, about 80%, about 85%, about 90%, about 95%, about 97%, about 98%, about 99%, or more (including any amount between those listed). In several embodiments, gene editing reduces expression of CD38 by about 30%, about 40%, about 50%, about 60%, about 70%, about 75%, about 80%, about 85%, about 90%, about 95%, about 97%, about 98%, about 99%, or more (including any amount between those listed). In several embodiments, gene editing reduces expression of CD38 by at least about 30%, In several embodiments, gene editing reduces expression of CD38 by at least about 40%, In several embodiments, gene editing reduces expression of CD38 by at least about 50%, In several embodiments, gene editing reduces expression of CD38 by at least about 60%, In several embodiments, gene editing reduces expression of CD38 by at least about 70%, In several embodiments, gene editing reduces expression of CD38 by at least about 80%, In several embodiments, gene editing reduces expression of CD38 by at least about 90%.

[0268] In several embodiments, a guide RNA (gRNA) comprising the sequence of any of SEQ ID NOS:866-874 is used to disrupt (e.g., reduce expression of) the CD38 gene.

[0269] In several embodiments, fructose-1,6-bisphosphatase (FBP1) is a target of gene editing. FBP1, located on chromosome 9, is a rate-limiting enzyme involved in gluconeogenesis. It functions mainly facilitate gluconeogenesis while inhibiting glycolysis. The FBP1-related impairment of NK cell glycolysis elicits dysfunction of NK cells (Cong et al., Cell Metab (2018) 28(2):243-55). However, according to several embodiments, disruption of FBP1 expression restores the function of NK cells.

[0270] In several embodiments, gene editing reduces transcription of FBP1 by about 30%, about 40%, about 50%, about 60%, about 70%, about 75%, about 80%, about 85%, about 90%, about 95%, about 97%, about 98%, about 99%, or more (including any amount between those listed). In several embodiments, gene editing reduces transcription of FBP1 by at least about 30%, In several embodiments, gene editing reduces transcription of FBP1 by at least about 40%, In several embodiments, gene editing reduces transcription of FBP1 by at least about 50%, In several embodiments, gene editing reduces transcription of FBP1 by at least about 60%, In several embodiments, gene editing reduces transcription of FBP1 by at least about 70%, In several embodiments, gene editing reduces transcription of FBP1 by at least about 80%, In several embodiments, gene editing reduces transcription of FBP1 by at least about 90%.

[0271] In several embodiments, gene editing can reduce expression of a target protein by about 30%, about 40%, about 50%, about 60%, about 70%, about 75%, about 80%, about 85%, about 90%, about 95%, about 97%, about 98%, about 99%, or more (including any amount between those listed). In several embodiments, gene editing reduces expression of FBP1 by about 30%, about 40%, about 50%, about 60%, about 70%, about 75%, about 80%, about 85%, about 90%, about 95%, about 97%, about 98%, about 99%, or more (including any amount between those listed). In several embodiments, gene editing reduces expression of FBP1 by at least about 30%, In several embodiments, gene editing reduces expression of FBP1 by at least about 40%, In several embodiments, gene editing reduces expression of FBP1 by at least about 50%, In several embodiments, gene editing reduces expression of FBP1 by at least about 60%, In several embodiments, gene editing reduces expression of FBP1 by at least about 70%, In several embodiments, gene editing reduces expression of FBP1 by at least about 80%, In several embodiments, gene editing reduces expression of FBP1 by at least about 90%.

[0272] In several embodiments, a guide RNA (gRNA) comprising the sequence of any of SEQ ID NOS:875-889 is used to disrupt (e.g., reduce expression of) the FBP1 gene.

[0273] In several embodiments, Insulin induced gene 1 (INSIG1) is a target of gene editing. INSIG1, located on chromosome 7, is a negative regulator of Sterol regulatory element-binding protein (SRBP) transcription. SRBP, when transcribed and expressed, is a protein involved in an essential aspect of glucose metabolism by NK cells, in particular related to NK cell functional responses (e.g., cytotoxicity) (Assmann et al., Nat Immunol (2017) 18(11):1197-1206). According to several embodiments, disruption of INSIG1 expression disinhibits and thus restores the function of NK cells.

[0274] In several embodiments, gene editing reduces transcription of INSIG1 by about 30%, about 40%, about 50%, about 60%, about 70%, about 75%, about 80%, about 85%, about 90%, about 95%, about 97%, about 98%, about 99%, or more (including any amount between those listed). In several embodiments, gene editing reduces transcription of INSIG1 by at least about 30%, In several embodiments, gene editing reduces transcription of INSIG1 by at least about 40%, In several embodiments, gene editing reduces transcription of INSIG1 by at least about 50%, In several embodiments, gene editing reduces transcription of INSIG1 by at least about 60%, In several embodiments, gene editing reduces transcription of INSIG1 by at least about 70%, In several embodiments, gene editing reduces transcription of INSIG1 by at least about 80%, In several embodiments, gene editing reduces transcription of INSIG1 by at least about 90%.

[0275] In several embodiments, gene editing can reduce expression of a target protein by about 30%, about 40%, about 50%, about 60%, about 70%, about 75%, about 80%, about 85%, about 90%, about 95%, about 97%, about 98%, about 99%, or more (including any amount between those listed). In several embodiments, gene editing reduces expression of INSIG1 by about 30%, about 40%, about 50%, about 60%, about 70%, about 75%, about 80%, about 85%, about 90%, about 95%, about 97%, about 98%, about 99%, or more (including any amount between those listed). In several embodiments, gene editing reduces expression of INSIG1 by at least about 30%, In several embodiments, gene editing reduces expression of INSIG1 by at least about 40%, In several embodiments, gene editing reduces expression of INSIG1 by at least about 50%, In several embodiments, gene editing reduces expression of INSIG1 by at least about 60%, In several embodiments, gene editing reduces expression of INSIG1 by at least about 70%, In several embodiments, gene editing reduces expression of INSIG1 by at least about 80%, In several embodiments, gene editing reduces expression of INSIG1 by at least about 90%.

[0276] In several embodiments, a guide RNA (gRNA) comprising the sequence of any of SEQ ID NOS:890-934 is used to disrupt (e.g., reduce expression of) the INSIG1 gene.

[0277] Cells require many different types of molecular complexes to achieve the cellular processes of transcription and translation. These complexes, made of multiple, sometimes differing, subunits have the capacity to impart cell-specific functions, depending on their assembly and activity. One such molecular complex is the Mediator complex, which is expressed and required in cells where genes are actively being expressed, such as immune cells, like NK cells. It primarily functions as a “molecular bridge” that anchors two regions of otherwise unconnected DNA within the cell. For example, it can link a promotor and an enhancer, in order to physically localize the various elements and associated transcription factors required for expression of genes transcribed by RNA polymerases. Mediator complex subunit 12 (MED12) is one part of the four-part cyclin dependent kinase (CDK) module of Mediator along with MED13, cyclin-dependent kinase 8 (CDK8) and cyclin C (CCNC). Mutations in MED12 have been associated with lymphoproliferative disorders (Kampjarvi et al., Oncotarget (2015) 6(3):1884-88). More recently, targeted deletion of MED12, CCNC, or CDK8 in human CAR T cells was observed to increase proliferation, cytokine production, and antitumor activity. In particular, MED12 deficient T cells exhibited changes at genes regulating effector T cell differentiation. See Freitas et al., Cancer Res (2022) 82(12_suppl):2822; and Freitas et al., Science (2022) 378(6620):eabn5647. It is contemplated that reductions in MED12, MED13, CDK8 and/or CCNC could provide edited cells, such as NK cells with an enhanced persistence, allowing (when engineered in accordance with embodiments provided for herein) enhanced cytotoxicity against target tumor cells.

[0278] In several embodiments, gene editing reduces transcription of MED12 by about 30%, about 40%, about 50%, about 60%, about 70%, about 75%, about 80%, about 85%, about 90%, about 95%, about 97%, about 98%, about 99%, or more (including any amount between those listed). In several embodiments, gene editing reduces transcription of MED12 by at least about 30%, In several embodiments, gene editing reduces transcription of MED12 by at least about 40%, In several embodiments, gene editing reduces transcription of MED12 by at least about 50%, In several embodiments, gene editing reduces transcription of MED12 by at least about 60%, In several embodiments, gene editing reduces transcription of MED12 by at least about 70%, In several embodiments, gene editing reduces transcription of MED12 by at least about 80%, In several embodiments, gene editing reduces transcription of MED12 by at least about 90%.

[0279] In several embodiments, gene editing can reduce expression of a target protein by about 30%, about 40%, about 50%, about 60%, about 70%, about 75%, about 80%, about 85%, about 90%, about 95%, about 97%, about 98%, about 99%, or more (including any amount between those listed). In several embodiments, gene editing reduces expression of MED12 by about 30%, about 40%, about 50%, about 60%, about 70%, about 75%, about 80%, about 85%, about 90%, about 95%, about 97%, about 98%, about 99%, or more (including any amount between those listed). In several embodiments, gene editing reduces expression of MED12 by at least about 30%, In several embodiments, gene editing reduces expression of MED12 by at least about 40%, In several embodiments, gene editing reduces expression of MED12 by at least about 50%, In several embodiments, gene editing reduces expression of MED12 by at least about 60%, In several embodiments, gene editing reduces expression of MED12 by at least about 70%, In several embodiments, gene editing reduces expression of MED12 by at least about 80%, In several embodiments, gene editing reduces expression of MED12 by at least about 90%.

[0280] In several embodiments, MED12 expression is disrupted and/or knocked out using a Crispr-Cas mediated approach (e.g., Cas9), or other guided nuclease as disclosed elsewhere herein, with the use of one more of the following MED12-specific guide RNAs: SEQ ID NOS 938-948 (see e.g., Table E2). In several embodiments, a guide RNA (gRNA) comprising the sequence of any of SEQ ID NOS:938-948 is used to disrupt (e.g., reduce expression of) the MED12 gene. Non-limiting examples of guide RNAs to reduce and/or eliminate MED12 expression are provided below in Table 1.

TABLE 1
MED12 Guide RNAs

| SEQ ID | | | |
|---|---|---|---|
| NO: | Name | Sequence | Target |
| 938 | MED12 gRNA1 | TGCAATAATGCTGCTGAAGT | Exon 3 |
| 939 | MED12 gRNA2 | AGTTATCCTTCTGGTTCACT | Exon 3 |
| 940 | MED12 gRNA3 | GTCAGTGAACCAAGTGTTAA | Exon 3 |
| 996 | MED12 gRNA4 | AGGATTGAAGCTGACGTTCT | Exon 2 |
| 997 | MED12 gRNA5 | TAACTGCTCCCATAAGTACT | Exon 5 |
| 998 | MED12 gRNA6 | GTGGGATTACACCGAGAAGC | Exon 5 |

[0281] In several embodiments, gene editing reduces transcription of MED13 by about 30%, about 40%, about 50%, about 60%, about 70%, about 75%, about 80%, about 85%, about 90%, about 95%, about 97%, about 98%, about 99%, or more (including any amount between those listed). In several embodiments, gene editing reduces transcription of MED13 by at least about 30%, In several embodiments, gene editing reduces transcription of MED13 by at least about 40%, In several embodiments, gene editing reduces transcription of MED13 by at least about 50%, In several embodiments, gene editing reduces transcription of MED13 by at least about 60%, In several embodiments, gene editing reduces transcription of MED13 by at least about 70%, In several embodiments, gene editing reduces transcription of MED13 by at least about 80%, In several embodiments, gene editing reduces transcription of MED13 by at least about 90%.

[0282] In several embodiments, gene editing can reduce expression of a target protein by about 30%, about 40%, about 50%, about 60%, about 70%, about 75%, about 80%, about 85%, about 90%, about 95%, about 97%, about 98%, about 99%, or more (including any amount between those listed). In several embodiments, gene editing reduces expression of MED13 by about 30%, about 40%, about 50%, about 60%, about 70%, about 75%, about 80%, about 85%, about 90%, about 95%, about 97%, about 98%, about 99%, or more (including any amount between those listed). In several embodiments, gene editing reduces expression of MED13 by at least about 30%, In several embodiments, gene editing reduces expression of MED13 by at least about 40%, In several embodiments, gene editing reduces expression of MED13 by at least about 50%, In several embodiments, gene editing reduces expression of MED13 by at least about 60%, In several embodiments, gene editing reduces expression of MED13 by at least about 70%, In several embodiments, gene editing reduces expression of MED13 by at least about 80%, In several embodiments, gene editing reduces expression of MED13 by at least about 90%.

[0283] In several embodiments, gene editing reduces transcription of CDK8 by about 30%, about 40%, about 50%, about 60%, about 70%, about 75%, about 80%, about 85%, about 90%, about 95%, about 97%, about 98%, about 99%, or more (including any amount between those listed). In several embodiments, gene editing reduces transcription of CDK8 by at least about 30%, In several embodiments, gene editing reduces transcription of CDK8 by at least about 40%, In several embodiments, gene editing reduces transcription of CDK8 by at least about 50%, In several embodiments, gene editing reduces transcription of CDK8 by at least about 60%, In several embodiments, gene editing reduces transcription of CDK8 by at least about 70%, In several embodiments, gene editing reduces transcription of CDK8 by at least about 80%, In several embodiments, gene editing reduces transcription of CDK8 by at least about 90%.

[0284] In several embodiments, gene editing can reduce expression of a target protein by about 30%, about 40%, about 50%, about 60%, about 70%, about 75%, about 80%, about 85%, about 90%, about 95%, about 97%, about 98%, about 99%, or more (including any amount between those listed). In several embodiments, gene editing reduces expression of CDK8 by about 30%, about 40%, about 50%, about 60%, about 70%, about 75%, about 80%, about 85%, about 90%, about 95%, about 97%, about 98%, about 99%, or more (including any amount between those listed). In several embodiments, gene editing reduces expression of CDK8 by at least about 30%, In several embodiments, gene editing reduces expression of CDK8 by at least about 40%, In several embodiments, gene editing reduces expression of CDK8 by at least about 50%, In several embodiments, gene editing reduces expression of CDK8 by at least about 60%, In several embodiments, gene editing reduces expression of CDK8 by at least about 70%, In several embodiments, gene editing reduces expression of CDK8 by at least about 80%, In several embodiments, gene editing reduces expression of CDK8 by at least about 90%.

[0285] In several embodiments, CDK8 expression is disrupted and/or knocked out using a Crispr-Cas mediated approach (e.g., Cas9), or other guided nuclease as disclosed elsewhere herein, with the use of one more of the following CDK8-specific guide RNAs: SEQ ID NOS 949-955 (see e.g., Table E2). In several embodiments, a guide RNA (gRNA) comprising the sequence of any of SEQ ID NOS:949-955 is used to disrupt (e.g., reduce expression of) the CDK8 gene. Non-limiting examples of guide RNAs to reduce and/or eliminate CDK8 expression are provided below in Table 2.

TABLE 2
CDK8 Guide RNAs

| SEQ ID | | | |
|---|---|---|---|
| NO: | Name | Sequence | Target |
| 949 | CDK8 gRNA1 | AAGTGAAGCTGAGCAGCGAG | Exon 1 |
| 950 | CDK8 gRNA2 | AGACGTGACCATAAGTGCCT | Exon 1 |
| 951 | CDK8 gRNA3 | GCGCCGCCCAGCGCGGACAC | Intron 1 |

[0286] In several embodiments, gene editing reduces transcription of CCNC by about 30%, about 40%, about 50%, about 60%, about 70%, about 75%, about 80%, about 85%, about 90%, about 95%, about 97%, about 98%, about 99%, or more (including any amount between those listed). In several embodiments, gene editing reduces transcription of CCNC by at least about 30%, In several embodiments, gene editing reduces transcription of CCNC by at least about 40%, In several embodiments, gene editing reduces transcription of CCNC by at least about 50%, In several embodiments, gene editing reduces transcription of CCNC by at least about 60%, In several embodiments, gene editing reduces transcription of CCNC by at least about 70%, In several embodiments, gene editing reduces transcription of CCNC by at least about 80%, In several embodiments, gene editing reduces transcription of CCNC by at least about 90%.

[0287] In several embodiments, gene editing can reduce expression of a target protein by about 30%, about 40%, about 50%, about 60%, about 70%, about 75%, about 80%, about 85%, about 90%, about 95%, about 97%, about 98%, about 99%, or more (including any amount between those listed). In several embodiments, gene editing reduces expression of CCNC by about 30%, about 40%, about 50%, about 60%, about 70%, about 75%, about 80%, about 85%, about 90%, about 95%, about 97%, about 98%, about 99%, or more (including any amount between those listed). In several embodiments, gene editing reduces expression of CCNC by at least about 30%, In several embodiments, gene editing reduces expression of CCNC by at least about 40%, In several embodiments, gene editing reduces expression of CCNC by at least about 50%, In several embodiments, gene editing reduces expression of CCNC by at least about 60%, In several embodiments, gene editing reduces expression of CCNC by at least about 70%, In several embodiments, gene editing reduces expression of CCNC by at least about 80%, In several embodiments, gene editing reduces expression of CCNC by at least about 90%.

[0288] In several embodiments, CCNC expression is disrupted and/or knocked out using a Crispr-Cas mediated approach (e.g., Cas9), or other guided nuclease as disclosed elsewhere herein, with the use of one more of the following CCNC-specific guide RNAs: SEQ ID NOS 956-962 (see e.g., Table E2). In several embodiments, a guide RNA (gRNA) comprising the sequence of any of SEQ ID NOS:956-962 is used to disrupt (e.g., reduce expression of) the CCNC gene. Non-limiting examples of guide RNAs to reduce and/or eliminate CCNC expression are provided below in Table 3.

TABLE 3
CCNC Guide RNAs

| SEQ ID | | | |
|---|---|---|---|
| NO: | Name | Sequence | Target |
| 956 | CCNC gRNA1 | ATTGGTTCAAATTGTATAGT | Intron 2 |
| 957 | CCNC gRNA2 | AGAGAAACTTTAAATCCTTT | Exon 2 |
| 958 | CCNC gRNA3 | TTCTAGTTTGCAATGGATTT | Exon 2 |
| 999 | CCNC gRNA4 | TAGGCAAAGATCCGTTCTGT | Exon 9 |
| 961 | CCNC gRNA5 | TCTGTTGAAGGAGCGCCAAA | Exon 2 |
| 1000 | CCNC gRNA6 | ACCTTTGCTCCAGTATGTGC | Exon 8 |
| 1001 | CCNC gRNA7 | ATACCTAAAGCTATCATGAA | Exon 9 |

[0289] Two additional transcription factors, which are known as key regulators of T cell exhaustion present themselves as promising targets in NK cells, likewise, to disrupt or otherwise reduce NK cell exhaustion. Inhibitor of DNA Binding 3 (ID3), is also known to be expressed highly in progenitor NK cells, but decreased in mature cells (Boos et al., J Exp Med (2007) 204(5):1119-30). Deletion of TD3 therefor, in several embodiments, imparts a more mature phenotype and activity to NK cells and/or reduces exhaustion. Likewise, SOX4 editing to reduce SOX4 expression, in several embodiments, reduces NK cell exhaustion (Good et al., Cell 184(25):P6081-6100).

[0290] In several embodiments, gene editing reduces transcription of ID3 by about 30%, about 40%, about 50%, about 60%, about 70%, about 75%, about 80%, about 85%, about 90%, about 95%, about 97%, about 98%, about 99%, or more (including any amount between those listed). In several embodiments, gene editing reduces transcription of ID3 by at least about 30%, In several embodiments, gene editing reduces transcription of ID3 by at least about 40%, In several embodiments, gene editing reduces transcription of ID3 by at least about 50%, In several embodiments, gene editing reduces transcription of ID3 by at least about 60%, In several embodiments, gene editing reduces transcription of ID3 by at least about 70%, In several embodiments, gene editing reduces transcription of ID3 by at least about 80%, In several embodiments, gene editing reduces transcription of ID3 by at least about 90%.

[0291] In several embodiments, gene editing can reduce expression of a target protein by about 30%, about 40%, about 50%, about 60%, about 70%, about 75%, about 80%, about 85%, about 90%, about 95%, about 97%, about 98%, about 99%, or more (including any amount between those listed). In several embodiments, gene editing reduces expression of ID3 by about 30%, about 40%, about 50%, about 60%, about 70%, about 75%, about 80%, about 85%, about 90%, about 95%, about 97%, about 98%, about 99%, or more (including any amount between those listed). In several embodiments, gene editing reduces expression of ID3 by at least about 30%, In several embodiments, gene editing reduces expression of ID3 by at least about 40%, In several embodiments, gene editing reduces expression of ID3 by at least about 50%, In several embodiments, gene editing reduces expression of ID3 by at least about 60%, In several embodiments, gene editing reduces expression of ID3 by at least about 70%, In several embodiments, gene editing reduces expression of ID3 by at least about 80%, In several embodiments, gene editing reduces expression of ID3 by at least about 90%.

[0292] In several embodiments, ID3 expression is disrupted and/or knocked out using a Crispr-Cas mediated approach (e.g., Cas9), or other guided nuclease as disclosed elsewhere herein, with the use of one more of the following ID3-specific guide RNAs: SEQ ID NOS 963-969 (see e.g., Table E2). In several embodiments, a guide RNA (gRNA) comprising the sequence of any of SEQ ID NOS:963-969 is used to disrupt (e.g., reduce expression of) the ID3 gene. Non-limiting examples of guide RNAs to reduce and/or eliminate ID3 expression are provided below in Table 4.

TABLE 4
ID3 Guide RNAs

| SEQ ID | | | |
|---|---|---|---|
| NO: | Name | Sequence | Target |
| 963 | ID3 gRNA1 | CTCCGGGTACCAGTTCCCGC | Exon 1 |
| 964 | ID3 gRNA2 | CTCAGCGGCTCCTCAGCTGC | Exon 1 |
| 965 | ID3 gRNA3 | CAGCATGAAGGCGCTGAGCC | Exon 1 |
| 969 | ID3 gRNA7 | TGGCCAGACTGCGTTCCGAC | Exon 1 |

[0293] In several embodiments, gene editing reduces transcription of SOX4 by about 30%, about 40%, about 50%, about 60%, about 70%, about 75%, about 80%, about 85%, about 90%, about 95%, about 97%, about 98%, about 99%, or more (including any amount between those listed). In several embodiments, gene editing reduces transcription of SOX4 by at least about 30%, In several embodiments, gene editing reduces transcription of SOX4 by at least about 40%, In several embodiments, gene editing reduces transcription of SOX4 by at least about 50%, In several embodiments, gene editing reduces transcription of SOX4 by at least about 60%, In several embodiments, gene editing reduces transcription of SOX4 by at least about 70%, In several embodiments, gene editing reduces transcription of SOX4 by at least about 80%, In several embodiments, gene editing reduces transcription of SOX4 by at least about 90%.

[0294] In several embodiments, gene editing can reduce expression of a target protein by about 30%, about 40%, about 50%, about 60%, about 70%, about 75%, about 80%, about 85%, about 90%, about 95%, about 97%, about 98%, about 99%, or more (including any amount between those listed). In several embodiments, gene editing reduces expression of SOX4 by about 30%, about 40%, about 50%, about 60%, about 70%, about 75%, about 80%, about 85%, about 90%, about 95%, about 97%, about 98%, about 99%, or more (including any amount between those listed). In several embodiments, gene editing reduces expression of SOX4 by at least about 30%, In several embodiments, gene editing reduces expression of SOX4 by at least about 40%, In several embodiments, gene editing reduces expression of SOX4 by at least about 50%, In several embodiments, gene editing reduces expression of SOX4 by at least about 60%, In several embodiments, gene editing reduces expression of SOX4 by at least about 70%, In several embodiments, gene editing reduces expression of SOX4 by at least about 80%, In several embodiments, gene editing reduces expression of SOX4 by at least about 90%.

[0295] In several embodiments, SOX4 expression is disrupted and/or knocked out using a Crispr-Cas mediated approach (e.g., Cas9), or other guided nuclease as disclosed elsewhere herein, with the use of one more of the following SOX4-specific guide RNAs: SEQ ID NOS 970-976 (see e.g., Table E2). In several embodiments, a guide RNA (gRNA) comprising the sequence of any of SEQ ID NOS:970-976 is used to disrupt (e.g., reduce expression of) the SOX4 gene. Non-limiting examples of guide RNAs to reduce and/or eliminate ID3 expression are provided below in Table 5.

TABLE 5
SOX4 Guide RNAs

| SEQ ID | | | |
|---|---|---|---|
| NO: | Name | Sequence | Target |
| 970 | SOX4 gRNA1 | TTCCGTGTTCTCGGCATTGT | Exon 1 |
| 971 | SOX4 gRNA2 | GGCGATTCCCAGCTCGAGGC | Exon 1 |
| 972 | SOX4 gRNA4 | GCTGGTGCAAGACCCCGAGT | Exon 1 |

[0296] In accordance with additional embodiments, other modulators of one or more aspects of NK cell (or T cell) function are modulated through gene editing. A variety of cytokines impart either negative (as with TGF-beta above) or positive signals to immune cells. By way of non-limiting example, IL15 is a positive regulator of NK cells, which as disclosed herein, can enhance one or more of NK cell homing, NK cell migration, NK cell expansion/proliferation, NK cell cytotoxicity, and/or NK cell persistence. To keep NK cells in check under normal physiological circumstances, a cytokine-inducible SH2-containing protein (CIS, encoded by the CISH gene) acts as a critical negative regulator of IL-15 signaling in NK cells. As discussed herein, because IL15 biology impacts multiple aspects of NK cell functionality, including, but not limited to, proliferation/expansion, activation, cytotoxicity, persistence, homing, migration, among others. Thus, according to several embodiments, editing CISH enhances the functionality of NK cells across multiple functionalities, leading to a more effective and long-lasting NK cell therapeutic. In several embodiments, inhibitors of CIS are used in conjunction with engineered NK cell administration. In several embodiments, CIS expression is knocked down or knocked out through gene editing of the CISH gene, for example, by use of CRISPR-Cas editing. Small interfering RNA, antisense RNA, TALENs or zinc fingers are used in other embodiments. In some embodiments CIS expression in T cells is knocked down through gene editing.

[0297] In several embodiments, as discussed above, editing of CISH advantageously imparts to the edited cells, particularly edited NK cells, enhanced expansion, cytotoxicity and/or persistence. Additionally, in several embodiments, the modification of the TCR comprises a modification to TCRα, but without impacting the signaling through the CD3 complex, allowing for T cell proliferation. In one embodiment, the TCRα is inactivated by expression of pre-Ta in the cells, thus restoring a functional CD3 complex in the absence of a functional alpha/beta TCR. As disclosed herein, the non-alloreactive modified T cells are also engineered to express a CAR to redirect the non-alloreactive T cells specificity towards tumor marker, but independent of MHC. Combinations of editing are used in several embodiments, such as knockout of the TCR and CISH in combination, or knock out of CISH and knock in of CD47, by way of non-limiting examples. In some embodiments, a combination of CISH knockout and CDK8 knockout are used in combination. In some embodiments, a combination of CISH knockout and CCNC knockout are used in combination. In some embodiments, a combination of CISH knockout and MED12 knockout are used in combination. In some embodiments, a combination of CISH knockout and MED13 knockout are used in combination.

[0298] In several embodiments, CISH gene editing endows an NK cell with enhanced ability to home to a target site. In several embodiments, CISH gene editing endows an NK cell with enhanced ability to migrate, e.g., within a tissue in response to, for example chemoattractants or away from repellants. In several embodiments, CISH gene editing endows an NK cell with enhanced ability to be activated, and thus exert, for example, anti-tumor effects. In several embodiments, CISH gene editing endows an NK cell with enhanced proliferative ability, which in several embodiments, allows for generation of robust NK cell numbers from a donor blood sample. In addition, in such embodiments, NK cells edited for CISH and engineered to express a CAR are more readily, robustly, and consistently expanded in culture. In several embodiments, CISH gene editing endows an NK cell with enhanced cytotoxicity. In several embodiments, the editing of CISH synergistically enhances the cytotoxic effects of engineered NK cells and/or engineered T cells that express a CAR.

[0299] In several embodiments, CISH gene editing activates or inhibits a wide variety of pathways. The CIS protein is a negative regulator of IL15 signaling by way of, for example, inhibiting JAK-STAT signaling pathways. These pathways would typically lead to transcription of IL15-responsive genes (including CISH). In several embodiments, knockdown of CISH disinhibits JAK-STAT (e.g., JAK1-STAT5) signaling and there is enhanced transcription of IL15-responsive genes. In several embodiments, knockout of CISH yields enhanced signaling through mammalian target of rapamycin (mTOR), with corresponding increases in expression of genes related to cell metabolism and respiration. In several embodiments, knockout of CISH yields IL15 induced increased expression of IL-2Rα (CD25), but not IL-15Rα or IL-2/15Rβ, enhanced NK cell membrane binding of IL15 and/or IL2, increased phosphorylation of STAT-3 and/or STAT-5, and elevated expression of the antiapoptotic proteins, such as Bcl-2. In several embodiments, CISH knockout results in IL15-induced upregulation of selected genes related to mitochondrial functions (e.g., electron transport chain and cellular respiration) and cell cycle. Thus, in several embodiments, knockout of CISH by gene editing enhances the NK cell cytotoxicity and/or persistence, at least in part via metabolic reprogramming. In several embodiments, negative regulators of cellular metabolism, such as TXNIP, are downregulated in response to CISH knockout. In several embodiments, promotors for cell survival and proliferation including BIRC5 (Survivin), TOP2A, CKS2, and RACGAP1 are upregulated after CISH knockout, whereas antiproliferative or proapoptotic proteins such as TGFB1, ATM, and PTCH1 are downregulated. In several embodiments, CISH knockout alters the state (e.g., activates or inactivates) signaling via or through one or more of CXCL-10, IL2, TNF, IFNg, IL13, IL4, Jnk, PRF1, STAT5, PRKCQ, IL2 receptor Beta, SOCS2, MYD88, STAT3, STAT1, TBX21, LCK, JAK3, IL& receptor, ABL1, IL9, STAT5A, STAT5B, Tcf7, PRDM1, and/or EOMES.

[0300] By way of non-limiting example, TGF-beta is one such cytokine released by tumor cells that results in immune suppression within the tumor microenvironment. That immune suppression reduces the ability of immune cells, even engineered CAR-immune cells is some cases, to destroy the tumor cells, thus allowing for tumor progression. In several embodiments, as discussed in detail below, immune checkpoints are disrupted through gene editing. In several embodiments, blockers of immune suppressing cytokines in the tumor microenvironment are used, including blockers of their release or competitive inhibitors that reduce the ability of the signaling molecule to bind and inhibit an immune cell. Such signaling molecules include, but are not limited to TGF-beta, IL10, arginase, inducible NOS, reactive-NOS, Arg1, Indoleamine 2,3-dioxygenase (IDO), and PGE₂. However, in additional embodiments, there are provided immune cells, such as NK cells, wherein the ability of the NK cell (or other cell) to respond to a given immunosuppressive signaling molecule is disrupted and/or eliminated. For example, in several embodiments, in several embodiments, NK cells or T cells are genetically edited to become have reduced sensitivity to TGF-beta. TGF-beta is an inhibitor of NK cell function on at least the levels of proliferation and cytotoxicity. Thus, according to some embodiments, the expression of the TGF-beta receptor is knocked down or knocked out through gene editing, such that the edited NK is resistant to the immunosuppressive effects of TGF-beta in the tumor microenvironment. In several embodiments, the TGFB2 receptor is knocked down or knocked out through gene editing, for example, by use of CRISPR-Cas editing. Small interfering RNA, antisense RNA, TALENs or zinc fingers are used in other embodiments. Other isoforms of the TGF-beta receptor (e.g., TGF-beta 1 and/or TGF-beta 3) are edited in some embodiments. In some embodiments TGF-beta receptors in T cells are knocked down through gene editing

[0301] Additional cellular engineering strategies are provided for herein that serve to further enhance the persistence of allogeneic cellular therapy products, such as allogeneic CAR-T cells and/or allogeneic CAR-NK cells. There is provided for herein, in several embodiments, a population of genetically engineered immune cells for cancer immunotherapy where the genetically engineered immune cells are genetically modified (e.g., gene edited) at one, two, three or more gene loci to enhance the cytotoxic activity, persistence, or other feature of the cells, such as NK cells and/or T cells.

[0302] As discussed herein, there are various strategies that can be employed to reduce the tendency of an allogeneic cell therapy product to induce host cell-mediated graft rejection. For example, in several embodiments the expression of B2M is reduced and/or eliminated in order to reduce the host-mediated graft rejection. In several embodiments, B2M expression is disrupted and/or knocked out using a Crispr-Cas mediated approach (e.g., Cas9), or other guided nuclease as disclosed elsewhere herein, with the use of one more of the following B2M-specific guide RNAs: SEQ ID 199—CGCGAGCACAGCTAAGGCCA; SEQ ID 200—GAGTAGCGCGAGCACAGCTA; SEQ ID 201—GCTACTCTCTCTTTCTGGCC; SEQ ID 202—GGCCGAGATGTCTCGCTCCG; SEQ ID 203—GGCCACGGAGCGAGACATCT; SEQ ID 204—CACAGCCCAAGATAGTTAAG; SEQ ID 205—AGTCACATGGTTCACACGGC; SEQ ID 206—AAGTCAACTTCAATGTCGGA; SEQ ID 207—ACTTGTCTTTCAGCAAGGAC; and SEQ ID 208—TGGGCTGTGACAAAGTCACA.

[0303] In several embodiments, gene editing reduces transcription of B2M by about 30%, about 40%, about 50%, about 60%, about 70%, about 75%, about 80%, about 85%, about 90%, about 95%, about 97%, about 98%, about 99%, or more (including any amount between those listed). In several embodiments, gene editing reduces transcription of B2M by at least about 30%, In several embodiments, gene editing reduces transcription of B2M by at least about 40%, In several embodiments, gene editing reduces transcription of B2M by at least about 50%, In several embodiments, gene editing reduces transcription of B2M by at least about 60%, In several embodiments, gene editing reduces transcription of B2M by at least about 70%, In several embodiments, gene editing reduces transcription of B2M by at least about 80%, In several embodiments, gene editing reduces transcription of B2M by at least about 90%.

[0304] In several embodiments, gene editing can reduce expression of a target protein by about 30%, about 40%, about 50%, about 60%, about 70%, about 75%, about 80%, about 85%, about 90%, about 95%, about 97%, about 98%, about 99%, or more (including any amount between those listed). In several embodiments, gene editing reduces expression of B2M by about 30%, about 40%, about 50%, about 60%, about 70%, about 75%, about 80%, about 85%, about 90%, about 95%, about 97%, about 98%, about 99%, or more (including any amount between those listed). In several embodiments, gene editing reduces expression of B2M by at least about 30%, In several embodiments, gene editing reduces expression of B2M by at least about 40%, In several embodiments, gene editing reduces expression of B2M by at least about 50%, In several embodiments, gene editing reduces expression of B2M by at least about 60%, In several embodiments, gene editing reduces expression of B2M by at least about 70%, In several embodiments, gene editing reduces expression of B2M by at least about 80%, In several embodiments, gene editing reduces expression of B2M by at least about 90%.

[0305] In several embodiments, the expression of ADORA2A (Adenosine 2a Receptor) is reduced and/or eliminated in order to increase overall activation in resultant T cells and/or NK cells, or other cell type provided for herein. In several embodiments, ADORA2A is disrupted and/or knocked out using one or more of the gene editing methods disclosed herein. In several embodiments, ADORA2A is disrupted and/or knocked out using a Crispr-Cas mediated approach (e.g., Cas9), or other guided nuclease as disclosed elsewhere herein, with the nuclease guided by the use of one more of the following ADORA2A-specific guide RNAs: SEQ ID NO: 404-407. In several embodiments, gene editing can reduce expression of a target protein by about 30%, about 40%, about 50%, about 60%, about 70%, about 75%, about 80%, about 85%, about 90%, about 95%, about 97%, about 98%, about 99%, or more (including any amount between those listed). Loss of expression of ADORA2A induces decreased sensitivity to adenosine, a well-established immunosuppressant for T cells and NK cells (Young et al., Cancer Res. (2018) 78(4):1003-16; Cekic and Linden, Cancer Res. (2014) 74(24):7239-49). In NK cells, loss of ADORA2A leads to loss of maturation, proliferation, effector function (as shown in constitutive knockout mice). In T cells, loss of ADORA2A leads to downstream loss of activation and function in CD8, increase in Treg and TH2, and loss of TH1. Thus, according to several embodiments, gene editing ADORA2A increases the cytotoxicity, persistence, immune avoidance or otherwise enhances the efficacy of engineered NK, T, or other cell as disclosed herein.

[0306] In several embodiments, gene editing reduces transcription of ADORA2A by about 30%, about 40%, about 50%, about 60%, about 70%, about 75%, about 80%, about 85%, about 90%, about 95%, about 97%, about 98%, about 99%, or more (including any amount between those listed). In several embodiments, gene editing reduces transcription of ADORA2A by at least about 30%, In several embodiments, gene editing reduces transcription of ADORA2A by at least about 40%, In several embodiments, gene editing reduces transcription of ADORA2A by at least about 50%, In several embodiments, gene editing reduces transcription of ADORA2A by at least about 60%, In several embodiments, gene editing reduces transcription of ADORA2A by at least about 70%, In several embodiments, gene editing reduces transcription of ADORA2A by at least about 80%, In several embodiments, gene editing reduces transcription of ADORA2A by at least about 90%.

[0307] In several embodiments, gene editing can reduce expression of a target protein by about 30%, about 40%, about 50%, about 60%, about 70%, about 75%, about 80%, about 85%, about 90%, about 95%, about 97%, about 98%, about 99%, or more (including any amount between those listed). In several embodiments, gene editing reduces expression of ADORA2A by about 30%, about 40%, about 50%, about 60%, about 70%, about 75%, about 80%, about 85%, about 90%, about 95%, about 97%, about 98%, about 99%, or more (including any amount between those listed). In several embodiments, gene editing reduces expression of ADORA2A by at least about 30%, In several embodiments, gene editing reduces expression of ADORA2A by at least about 40%, In several embodiments, gene editing reduces expression of ADORA2A by at least about 50%, In several embodiments, gene editing reduces expression of ADORA2A by at least about 60%, In several embodiments, gene editing reduces expression of ADORA2A by at least about 70%, In several embodiments, gene editing reduces expression of ADORA2A by at least about 80%, In several embodiments, gene editing reduces expression of ADORA2A by at least about 90%.

[0308] The tumor microenvironment (TME), as suggested with the nomenclature, is the environment around a tumor, which includes the surrounding blood vessels and capillaries, immune cells circulating through or retained in the area, fibroblasts, various signaling molecules related by the tumor cells, the immune cells or other cells in the area, as well as the surrounding extracellular matrix. Various mechanisms are employed by tumors to evade detection and/or destruction by host immune cells, including modification of the TME. Tumors may alter the TME by releasing extracellular signals, promoting tumor angiogenesis or even inducing immune tolerance, in part by limiting immune cell entry in the TME and/or limiting reproduction/expansion of immune cells in the TME. The tumor can also modify the extracellular matrix (ECM), which can allow pathways to develop for tumor extravasation to new sites. Transforming Growth-Factor beta (TGFb) has beneficial effects when reducing inflammation and preventing autoimmunity. However, it can also function to inhibit anti-tumor immune responses, and thus, upregulated expression of TGFb has been implicated in tumor progression and metastasis (Pickup et al., Nat. Rev. Cancer (2013) 13(11):788-99). TGFb signaling can inhibit the cytotoxic function of NK cells by interacting with the TGFb receptor expressed by NK cells, for example the TGFb receptor isoform II (TGFBR2). In accordance with several embodiments disclosed herein, the reduction or elimination of expression of TGFBR2 through gene editing (e.g., by CRISPr/Cas9 guided by a TGFBR2 guide RNA) interrupts the inhibitory effect of TGFb on NK cells.

[0309] In several embodiments, the expression of TGFBR2 is reduced and/or eliminated in order to increase overall activation in resultant T cells and/or NK cells, or other cell type provided for herein. In several embodiments, TGFBR2 is disrupted and/or knocked out using one or more of the gene editing methods disclosed herein. Non-limiting examples of guide RNAs to reduce and/or eliminate TGFBR2 expression are provided below in Table 6.

TABLE 6
TGFb Receptor Type 2 Isoform Guide RNAs

| SEQ ID | | | |
|---|---|---|---|
| NO: | Name | Sequence | Target |
| 147 | TGFBR2-1 | CCCCTACCATGACTTTATTC | Exon 4 |
| 148 | TGFBR2-2 | ATTGCACTCATCAGAGCTAC | Exon 4 |
| 149 | TGFBR2-3 | AGTCATGGTAGGGGAGCTTG | Exon 4 |
| 150 | TGFBR2-4 | TGCTGGCGATACGCGTCCAC | Exon 1 |
| 151 | TGFBR2-5 | GTGAGCAATCCCCCGGGCGA | Exon 4 |
| 152 | TGFBR2-6 | AACGTGCGGTGGGATCGTGC | Exon 1 |

[0310] In several embodiments, TGFBR2 is disrupted and/or knocked out using a Crispr-Cas mediated approach (e.g., Cas9), or other guided nuclease as disclosed elsewhere herein, with the nuclease guided by the use of one more of the following TGFBR2-specific guide RNAs: SEQ ID NO: 445-448.

[0311] In several embodiments, gene editing reduces transcription of TGFBR2 by about 30%, about 40%, about 50%, about 60%, about 70%, about 75%, about 80%, about 85%, about 90%, about 95%, about 97%, about 98%, about 99%, or more (including any amount between those listed). In several embodiments, gene editing reduces transcription of TGFBR2 by at least about 30%, In several embodiments, gene editing reduces transcription of TGFBR2 by at least about 40%, In several embodiments, gene editing reduces transcription of TGFBR2 by at least about 50%, In several embodiments, gene editing reduces transcription of TGFBR 2 by at least about 60%, In several embodiments, gene editing reduces transcription of TGFBR2 by at least about 70%, In several embodiments, gene editing reduces transcription of TGFBR2 by at least about 80%, In several embodiments, gene editing reduces transcription of TGFBR2 by at least about 90%.

[0312] In several embodiments, gene editing can reduce expression of a target protein by about 30%, about 40%, about 50%, about 60%, about 70%, about 75%, about 80%, about 85%, about 90%, about 95%, about 97%, about 98%, about 99%, or more (including any amount between those listed). In several embodiments, gene editing reduces expression of TGFBR2 by about 30%, about 40%, about 50%, about 60%, about 70%, about 75%, about 80%, about 85%, about 90%, about 95%, about 97%, about 98%, about 99%, or more (including any amount between those listed). In several embodiments, gene editing reduces expression of TGFBR2 by at least about 30%, In several embodiments, gene editing reduces expression of TGFBR2 by at least about 40%, In several embodiments, gene editing reduces expression of TGFBR2 by at least about 50%, In several embodiments, gene editing reduces expression of TGFBR2 by at least about 60%, In several embodiments, gene editing reduces expression of TGFBR2 by at least about 70%, In several embodiments, gene editing reduces expression of TGFBR2 by at least about 80%, In several embodiments, gene editing reduces expression of TGFBR2 by at least about 90%.

[0313] In NK cells, TGFBR2 is a potent checkpoint in NK cell-mediated tumor immunity, while for T cells, knockout of TGFBR2 rescues car T cell exhaustion induced by TGF-$1 (Tang et al., JCI Insight (2020) 5(4):e133977). Thus, according to several embodiments, gene editing TGFBR2 increases the cytotoxicity, persistence, and/or otherwise enhances the efficacy of engineered NK, T, or other cell as disclosed herein.

[0314] In accordance with additional embodiments, a disruption of, or elimination of, expression of a receptor, pathway or protein on an immune cell can result in the enhanced activity (e.g., cytotoxicity, persistence, etc.) of the immune cell against a target cancer cell. In several embodiments, this results from a disinhibition of the immune cell. Natural killer cells, express a variety of receptors, such particularly those within the Natural Killer Group 2 family of receptors. One such receptor, according to several embodiments disclosed herein, the NKG2D receptor, is used to generate cytotoxic signaling constructs that are expressed by NK cells and lead to enhanced anti-cancer activity of such NK cells. In addition, NK cells express the NKG2A receptor, which is an inhibitory receptor. One mechanism by which tumors develop resistance to immune cells is through the expression of peptide-loaded HLA Class I molecules (HLA-E), which suppresses the activity of NK cells through the ligation of the HLA-E with the NKG2A receptor. Thus, while one approach could be to block the interaction of the HLA-E with the expressed NKG2A receptors on NK cells, according to several embodiments disclosed herein, the expression of NKG2A is disrupted, which short circuits that inhibitory pathway and allows enhanced NK cell cytotoxicity.

[0315] Non-limiting examples of guide RNAs to reduce and/or eliminate NKG2A expression are provided below in Table 7.

TABLE 7
NKG2A Guide RNAs

| SEQ ID | | | |
|---|---|---|---|
| NO: | Name | Sequence | Target |
| 158 | NKG2A-1 | GGAGCTGATGGTAAATCTGC | Exon 4 |
| 159 | NKG2A-2 | TTGAAGGTTTAATTCCGCAT | Exon 3 |
| 160 | NKG2A-3 | AACAACTATCGTTACCACAG | Exon 4 |

[0316] In several embodiments, NKG2A is disrupted and/or knocked out using a Crispr-Cas mediated approach (e.g., Cas9), or other guided nuclease as disclosed elsewhere herein, with the nuclease guided by the use of one more of the following NKG2A-specific guide RNAs: SEQ ID NO: 450-452.

[0317] In several embodiments, gene editing reduces transcription of NKG2A by about 30%, about 40%, about 50%, about 60%, about 70%, about 75%, about 80%, about 85%, about 90%, about 95%, about 97%, about 98%, about 99%, or more (including any amount between those listed). In several embodiments, gene editing reduces transcription of NKG2A by at least about 30%. In several embodiments, gene editing reduces transcription of NKG2A by at least about 40%. In several embodiments, gene editing reduces transcription of NKG2A by at least about 50%. In several embodiments, gene editing reduces transcription of NKG2A by at least about 60%. In several embodiments, gene editing reduces transcription of NKG2A by at least about 70%. In several embodiments, gene editing reduces transcription of NKG2A by at least about 80%. In several embodiments, gene editing reduces transcription of NKG2A by at least about 90%.

[0318] In several embodiments, gene editing can reduce expression of a target protein by about 30%, about 40%, about 50%, about 60%, about 70%, about 75%, about 80%, about 85%, about 90%, about 95%, about 97%, about 98%, about 99%, or more (including any amount between those listed). In several embodiments, gene editing reduces expression of NKG2A by about 30%, about 40%, about 50%, about 60%, about 70%, about 75%, about 80%, about 85%, about 90%, about 95%, about 97%, about 98%, about 99%, or more (including any amount between those listed). In several embodiments, gene editing reduces expression of NKG2A by at least about 30%. In several embodiments, gene editing reduces expression of NKG2A by at least about 40%. In several embodiments, gene editing reduces expression of NKG2A by at least about 50%. In several embodiments, gene editing reduces expression of NKG2A by at least about 60%. In several embodiments, gene editing reduces expression of NKG2A by at least about 70%. In several embodiments, gene editing reduces expression of NKG2A by at least about 80%. In several embodiments, gene editing reduces expression of NKG2A by at least about 90%.

[0319] NKG2A binds to HLA-E and is recognized as an MHC-recognizing receptor. Since NKG2A is an inhibitor receptor, loss of expression of NKG2A induces increased activation of constituent cells. In NK and T cells. loss of NKG2A leads to increased activation and cytotoxicity against HLA-E expressing tumor cells (Kamiya et al., J. Clin. Invest. (2019) 129(5):2094-2106). Thus, according to several embodiments, gene editing NKG2A increases the cytotoxicity, persistence, and/or otherwise enhances the efficacy of engineered NK, T, or other cell as disclosed herein.

[0320] Interleukins, in particular interleukin-15, are important in NK cell function and survival. Suppressor of cytokine signaling (SOCS) proteins are negative regulators of cytokine release by NK cells. The protein tyrosine phosphatase CD45 is an important regulator of NK cell activity through Src-family kinase activity. CD45 expression is involved in ITAM-specific NK-cell functions and processes such as degranulation, cytokine production, and expansion (Hesslein et al., Blood (2011) 117(11):3087-95). Thus, knockout of CD45 expression should result in less effective NK cells. As discussed above, CRISPR/Cas9 was used to disrupt expression of CD45 (encoded by PTPRC) and SOCS2, though in additional embodiments, other gene editing approaches can be used. Non-limiting examples of CD45 and SOCS2-targeting guide RNAs are shown below in Table 8.

TABLE 8
CD45 and SOCS2 Guide RNAs

| SEQ ID | | | |
|---|---|---|---|
| NO: | Name | Sequence | Target |
| 170 | PTPRC-1 | AGTGCTGGTGTTGGGCGCAC | Exon 25 |
| 171 | SOCS2-1 | GTGAACAGTGCCGTTCCGGGGGG | Exon 3 |
| 1002 | SOCS2-4 | GTGAACAGTGCCGTTCCGGG | Exon 3 |
| 172 | SOCS2-2 | GGCACCGGTACATTTGTTAATGG | Exon 3 |
| 1003 | SOCS2-5 | GGCACCGGTACATTTGTTAA | Exon 3 |
| 173 | SOCS2-3 | TTCGCCAGACGCGCCGCCTGCGG | Exon 2 |
| 1004 | SOCS2-6 | TTCGCCAGACGCGCCGCCTG | Exon 2 |

[0321] In several embodiments, gene editing reduces transcription of PTPRC by about 30%, about 40%, about 50%, about 60%, about 70%, about 75%, about 80%, about 85%, about 90%, about 95%, about 97%, about 98%, about 99%, or more (including any amount between those listed). In several embodiments, gene editing reduces transcription of PTPRC by at least about 30%. In several embodiments, gene editing reduces transcription of PTPRC by at least about 40%. In several embodiments, gene editing reduces transcription of PTPRC by at least about 50%. In several embodiments, gene editing reduces transcription of PTPRC by at least about 60%. In several embodiments, gene editing reduces transcription of PTPRC by at least about 70%. In several embodiments, gene editing reduces transcription of PTPRC by at least about 80%. In several embodiments, gene editing reduces transcription of PTPRC by at least about 90%.

[0322] In several embodiments, gene editing can reduce expression of a target protein by about 30%, about 40%, about 50%, about 60%, about 70%, about 75%, about 80%, about 85%, about 90%, about 95%, about 97%, about 98%, about 99%, or more (including any amount between those listed). In several embodiments, gene editing reduces expression of CD45 by about 30%, about 40%, about 50%, about 60%, about 70%, about 75%, about 80%, about 85%, about 90%, about 95%, about 97%, about 98%, about 99%, or more (including any amount between those listed). In several embodiments, gene editing reduces expression of CD45 by at least about 30%. In several embodiments, gene editing reduces expression of CD45 by at least about 40%. In several embodiments, gene editing reduces expression of CD45 by at least about 50%. In several embodiments, gene editing reduces expression of CD45 by at least about 60%. In several embodiments, gene editing reduces expression of CD45 by at least about 70%. In several embodiments, gene editing reduces expression of CD45 by at least about 80%. In several embodiments, gene editing reduces expression of CD45 by at least about 90%.

[0323] In several embodiments, SOCS2 is disrupted and/or knocked out using a Crispr-Cas mediated approach (e.g., Cas9), or other guided nuclease as disclosed elsewhere herein, with the nuclease guided by the use of one more of the following SOCS2-specific guide RNAs: SEQ ID NO: 457-462.

[0324] In several embodiments, gene editing reduces transcription of SOCS2 by about 30%, about 40%, about 50%, about 60%, about 70%, about 75%, about 80%, about 85%, about 90%, about 95%, about 97%, about 98%, about 99%, or more (including any amount between those listed). In several embodiments, gene editing reduces transcription of SOCS2 by at least about 30%. In several embodiments, gene editing reduces transcription of SOCS2 by at least about 40%. In several embodiments, gene editing reduces transcription of SOCS2 by at least about 50%. In several embodiments, gene editing reduces transcription of SOCS2 by at least about 60%. In several embodiments, gene editing reduces transcription of SOCS2 by at least about 70%. In several embodiments, gene editing reduces transcription of SOCS2 by at least about 80%. In several embodiments, gene editing reduces transcription of SOCS2 by at least about 90%.

[0325] In several embodiments, gene editing can reduce expression of a target protein by about 30%, about 40%, about 50%, about 60%, about 70%, about 75%, about 80%, about 85%, about 90%, about 95%, about 97%, about 98%, about 99%, or more (including any amount between those listed). In several embodiments, gene editing reduces expression of SOCS2 by about 30%, about 40%, about 50%, about 60%, about 70%, about 75%, about 80%, about 85%, about 90%, about 95%, about 97%, about 98%, about 99%, or more (including any amount between those listed). In several embodiments, gene editing reduces expression of SOCS2 by at least about 30%. In several embodiments, gene editing reduces expression of SOCS2 by at least about 40%. In several embodiments, gene editing reduces expression of SOCS2 by at least about 50%. In several embodiments, gene editing reduces expression of SOCS2 by at least about 60%. In several embodiments, gene editing reduces expression of SOCS2 by at least about 70%. In several embodiments, gene editing reduces expression of SOCS2 by at least about 80%. In several embodiments, gene editing reduces expression of SOCS2 by at least about 90%.

[0326] SOCS proteins are negative regulators of cytokine responses, and SOCS2 specifically negatively regulates the development of NK cells through inhibiting JAK2 activity. Loss of expression of SOCS2 in NK cells induces increased NK cell development and overall cytotoxicity (Kim et al., Scientific Reports (2017) 7:46153). Thus, according to several embodiments, gene editing SOCS2 increases the cytotoxicity, persistence, and/or otherwise enhances the efficacy of engineered NK, T, or other cell as disclosed herein.

[0327] In several embodiments, the expression of Casitas B-lineage lymphoma-b (Cbl-b) is reduced and/or eliminated in order to increase overall activation in resultant T cells and/or NK cells, or other cell type provided for herein. In several embodiments, Cbl-b is disrupted and/or knocked out using one or more of the gene editing methods disclosed herein. In several embodiments, Cbl-b is disrupted and/or knocked out using a Crispr-Cas mediated approach (e.g., Cas9), or other guided nuclease as disclosed elsewhere herein. Non-limiting examples of CBLB-targeting guide RNAs to reduce and/or eliminate expression of CBLB are shown below in Table 9.

TABLE 9
CBLB Guide RNAs

| SEQ ID | | | |
|---|---|---|---|
| NO: | Name | Sequence | Target |
| 164 | CBLB-1 | TAATCTGGTGGACCTCATGAAGG | Exon 5 |
| 1005 | CBLB-8 | TAATCTGGTGGACCTCATGA | Exon 5 |
| 165 | CBLB-2 | TCGGTTGGCAAACGTCCGAAAGG | Exon 10 |
| 1006 | CBLB-9 | TCGGTTGGCAAACGTCCGAA | Exon 10 |
| 166 | CBLB-3 | AGCAAGCTGCCGCAGATCGCAGG | Exon 2 |
| 1007 | CBLB-10 | AGCAAGCTGCCGCAGATCGC | Exon 2 |
| 935 | CBLB-4 | AAGACTCTTTAAAGAAGGCA | Exon 3 |
| 936 | CBLB-5 | AGTACTCATTCTCACTGAGT | Exon 3 |
| 937 | CBLB-6 | CGTAAATGCTGATATGTATC | Exon 3 |
| 1008 | CBLB-7 | TAATCTGGTGGACCTCATGA | Exon 5 |

[0328] In several embodiments, Cbl-b is disrupted and/or knocked out using a Crispr-Cas mediated approach (e.g., Cas9), or other guided nuclease as disclosed elsewhere herein, with the use of one more of the following CBLB-specific guide RNAs: SEQ ID NO: 453-456.

[0329] In several embodiments, gene editing reduces transcription of CBLB by about 30%, about 40%, about 50%, about 60%, about 70%, about 75%, about 80%, about 85%, about 90%, about 95%, about 97%, about 98%, about 99%, or more (including any amount between those listed). In several embodiments, gene editing reduces transcription of CBLB by at least about 30%. In several embodiments, gene editing reduces transcription of CBLB by at least about 40%. In several embodiments, gene editing reduces transcription of CBLB by at least about 50%. In several embodiments, gene editing reduces transcription of CBLB by at least about 60%. In several embodiments, gene editing reduces transcription of CBLB by at least about 70%. In several embodiments, gene editing reduces transcription of CBLB by at least about 80%. In several embodiments, gene editing reduces transcription of CBLB by at least about 90%.

[0330] In several embodiments, gene editing can reduce expression of a target protein by about 30%, about 40%, about 50%, about 60%, about 70%, about 75%, about 80%, about 85%, about 90%, about 95%, about 97%, about 98%, about 99%, or more (including any amount between those listed). In several embodiments, gene editing reduces expression of Cbl-b by about 30%, about 40%, about 50%, about 60%, about 70%, about 75%, about 80%, about 85%, about 90%, about 95%, about 97%, about 98%, about 99%, or more (including any amount between those listed). In several embodiments, gene editing reduces expression of Cbl-b by at least about 30%. In several embodiments, gene editing reduces expression of Cbl-b by at least about 40%. In several embodiments, gene editing reduces expression of Chl-b by at least about 50%. In several embodiments, gene editing reduces expression of Cbl-b by at least about 60%. In several embodiments, gene editing reduces expression of Cbl-b by at least about 70%. In several embodiments, gene editing reduces expression of Cbl-b by at least about 80%. In several embodiments, gene editing reduces expression of Cbl-b by at least about 90%.

[0331] Cbl-b is an E3 ubiquitin ligase that negatively regulates T cell activation Loss of expression of Cbl-b in NK cells and T cells demonstrate increased antitumor immunity. Moreover, Cbl-b deficient T cells and NK cells are resistant to PD-Li/PD-1 mediated suppression (Fujiwara et al., Front. Immunol. (2017) 8:42). Thus, according to several embodiments, gene editing Cbl-b increases the cytotoxicity, persistence, and/or otherwise enhances the efficacy of engineered NK, T, or other cell as disclosed herein.

[0332] Another E3 ubiquitin ligase, TRIpartite Motif-containing protein 29 (TRIM29), is a negative regulator of NK cell functions (Dou et al., J. Immunol. (2019) 203(4):873-80). TRIM29 is generally not expressed by resting NK cells, but is readily upregulated following activation (in particular by IL-12/IL-18 stimulation). Non-limiting examples of TRIM29-targeting guide RNAs to reduce and/or eliminate TRIM29 expression are shown below in Table 10.

TABLE 10
TRIM29 Guide RNAs

| SEQ ID | | | |
|---|---|---|---|
| NO: | Name | Sequence | Target |
| 167 | TRIM29-1 | GAACGGTAGGTCCCCTCTCGTGG | Exon 4 |
| 1009 | TRIM29-4 | GAACGGTAGGTCCCCTCTCG | Exon 4 |
| 168 | TRIM29-2 | AGCTGCCTTGGACGACGGGCAGG | Exon 7 |
| 1010 | TRIM29-5 | AGCTGCCTTGGACGACGGGC | Exon 7 |
| 169 | TRIM29-3 | TGAGCCGTAACTTCATTGAGAGG | Exon 4 |
| 1011 | TRIM29-6 | TGAGCCGTAACTTCATTGAG | Exon 4 |

[0333] In several embodiments, gene editing reduces transcription of TRIM29 by about 30%, about 40%, about 50%, about 60%, about 70%, about 75%, about 80%, about 85%, about 90%, about 95%, about 97%, about 98%, about 99%, or more (including any amount between those listed). In several embodiments, gene editing reduces transcription of TRIM29 by at least about 30%. In several embodiments, gene editing reduces transcription of TRIM29 by at least about 40%. In several embodiments, gene editing reduces transcription of TRIM29 by at least about 50%. In several embodiments, gene editing reduces transcription of TRIM29 by at least about 60%. In several embodiments, gene editing reduces transcription of TRIM29 by at least about 70%. In several embodiments, gene editing reduces transcription of TRIM29 by at least about 80%. In several embodiments, gene editing reduces transcription of TRIM29 by at least about 90%.

[0334] In several embodiments, gene editing can reduce expression of a target protein (e.g., TRIM29) by about 30%, about 40%, about 50%, about 60%, about 70%, about 75%, about 80%, about 85%, about 90%, about 95%, about 97%, about 98%, about 99%, or more (including any amount between those listed). In several embodiments, gene editing reduces expression of TRIM29 by about 30%, about 40%, about 50%, about 60%, about 70%, about 75%, about 80%, about 85%, about 90%, about 95%, about 97%, about 98%, about 99%, or more (including any amount between those listed). In several embodiments, gene editing reduces expression of TRIM29 by at least about 30%. In several embodiments, gene editing reduces expression of TRIM29 by at least about 40%. In several embodiments, gene editing reduces expression of TRIM29 by at least about 50%. In several embodiments, gene editing reduces expression of TRIM29 by at least about 60%. In several embodiments, gene editing reduces expression of TRIM29 by at least about 70%. In several embodiments, gene editing reduces expression of TRIM29 by at least about 80%. In several embodiments, gene editing reduces expression of TRIM29 by at least about 90%.

[0335] In several embodiments, the expression of Beta-2 Microglobulin (B2-microglobulin) is reduced and/or eliminated in order to increase overall activation in resultant T cells and/or NK cells, or other cell type provided for herein. In several embodiments, B2-microglobulin is disrupted and/or knocked out using one or more of the gene editing methods disclosed herein. In several embodiments, B2-microglobulin is disrupted and/or knocked out using a Crispr-Cas mediated approach (e.g., Cas9), or other guided nuclease as disclosed elsewhere herein, with the nuclease guided by the use of one more of the following B2-microglobulin-specific guide RNAs: SEQ ID NO: 199-208.

[0336] In several embodiments, gene editing reduces transcription of B2M by about 30%, about 40%, about 50%, about 60%, about 70%, about 75%, about 80%, about 85%, about 90%, about 95%, about 97%, about 98%, about 99%, or more (including any amount between those listed). In several embodiments, gene editing reduces transcription of B2M by at least about 30%. In several embodiments, gene editing reduces transcription of B2M by at least about 40%. In several embodiments, gene editing reduces transcription of B2M by at least about 50%. In several embodiments, gene editing reduces transcription of B2M by at least about 60%. In several embodiments, gene editing reduces transcription of B2M by at least about 70%. In several embodiments, gene editing reduces transcription of B2M by at least about 80%. In several embodiments, gene editing reduces transcription of B2M by at least about 90%.

[0337] In several embodiments, gene editing can reduce expression of a target protein by about 30%, about 40%, about 50%, about 60%, about 70%, about 75%, about 80%, about 85%, about 90%, about 95%, about 97%, about 98%, about 99%, or more (including any amount between those listed). In several embodiments, gene editing reduces expression of B2M by about 30%, about 40%, about 50%, about 60%, about 70%, about 75%, about 80%, about 85%, about 90%, about 95%, about 97%, about 98%, about 99%, or more (including any amount between those listed). In several embodiments, gene editing reduces expression of B2M by at least about 30%. In several embodiments, gene editing reduces expression of B2M by at least about 40%. In several embodiments, gene editing reduces expression of B2M by at least about 50%. In several embodiments, gene editing reduces expression of B2M by at least about 60%. In several embodiments, gene editing reduces expression of B2M by at least about 70%. In several embodiments, gene editing reduces expression of B2M by at least about 80%. In several embodiments, gene editing reduces expression of B2M by at least about 90%.

[0338] Loss of expression of B2-microglobulin induces greatly reduced levels of MHC class I molecules, and in both NK cells and T cells, reduction of B2-microglobulin can modulate overall cell recognition of autologous and allogenic cells. Thus, according to several embodiments, gene editing B2-microglobulin increases the cytotoxicity, persistence, and/or otherwise enhances the efficacy of engineered NK, T, or other cell as disclosed herein.

[0339] In several embodiments, the expression of T cell immunoreceptor with Ig and ITIM domains (TIGIT) is reduced and/or eliminated in order to increase overall activation in resultant T cells and/or NK cells, or other cell type provided for herein. In several embodiments, TIGIT is disrupted and/or knocked out using one or more of the gene editing methods disclosed herein. In several embodiments, TIGIT is disrupted and/or knocked out using a Crispr-Cas mediated approach (e.g., Cas9), or other guided nuclease as disclosed elsewhere herein, with the nuclease guided by the use of one more of the following TIGIT-specific guide RNAs: SEQ ID NO: 408-411.

[0340] In several embodiments, gene editing reduces transcription of TIGIT by about 30%, about 40%, about 50%, about 60%, about 70%, about 75%, about 80%, about 85%, about 90%, about 95%, about 97%, about 98%, about 99%, or more (including any amount between those listed). In several embodiments, gene editing reduces transcription of TIGIT by at least about 30%. In several embodiments, gene editing reduces transcription of TIGIT by at least about 40%. In several embodiments, gene editing reduces transcription of TIGIT by at least about 50%. In several embodiments, gene editing reduces transcription of TIGIT by at least about 60%. In several embodiments, gene editing reduces transcription of TIGIT by at least about 70%. In several embodiments, gene editing reduces transcription of TIGIT by at least about 80%. In several embodiments, gene editing reduces transcription of TIGIT by at least about 90%.

[0341] In several embodiments, gene editing can reduce expression of a target protein by about 30%, about 40%, about 50%, about 60%, about 70%, about 75%, about 80%, about 85%, about 90%, about 95%, about 97%, about 98%, about 99%, or more (including any amount between those listed). In several embodiments, gene editing reduces expression of TIGIT by about 30%, about 40%, about 50%, about 60%, about 70%, about 75%, about 80%, about 85%, about 90%, about 95%, about 97%, about 98%, about 99%, or more (including any amount between those listed). In several embodiments, gene editing reduces expression of TIGIT by at least about 30%. In several embodiments, gene editing reduces expression of TIGIT by at least about 40%. In several embodiments, gene editing reduces expression of TIGIT by at least about 50%. In several embodiments, gene editing reduces expression of TIGIT by at least about 60%. In several embodiments, gene editing reduces expression of TIGIT by at least about 70%. In several embodiments, gene editing reduces expression of TIGIT by at least about 80%. In several embodiments, gene editing reduces expression of TIGIT by at least about 90%.

[0342] TIGIT is a checkpoint receptor associated with T cell and NK cell exhaustion. Loss of expression of TIGIT in NK cells prevents NK cell exhaustion and promotes NK cell-dependent tumor immunity (Zhang et al., Nat. Immunol. (2018) 19(7):723-32). Loss of expression of TIGIT in T cells can similarly lead to downstream activation of resultant T cells. Thus, according to several embodiments, gene editing TIGIT increases the cytotoxicity, persistence, and/or otherwise enhances the efficacy of engineered NK, T, or other cell as disclosed herein.

[0343] In several embodiments, the expression of Programmed cell death protein-1 (PD-1; encoded by PDCD1) is reduced and/or eliminated in order to increase overall activation in resultant T cells and/or NK cells, or other cell type provided for herein. In several embodiments, PD-1 is disrupted and/or knocked out using one or more of the gene editing methods disclosed herein. In several embodiments, PD-1 is disrupted and/or knocked out using a Crispr-Cas mediated approach (e.g., Cas9), or other guided nuclease as disclosed elsewhere herein, with the nuclease guided by the use of one more of the following PD-1-specific guide RNAs: SEQ ID NO: 412-415.

[0344] In several embodiments, gene editing reduces transcription of PDCD1 by about 30%, about 40%, about 50%, about 60%, about 70%, about 75%, about 80%, about 85%, about 90%, about 95%, about 97%, about 98%, about 99%, or more (including any amount between those listed). In several embodiments, gene editing reduces transcription of PDCD1 by at least about 30%. In several embodiments, gene editing reduces transcription of PDCD1 by at least about 40%. In several embodiments, gene editing reduces transcription of PDCD1 by at least about 50%. In several embodiments, gene editing reduces transcription of PDCD1 by at least about 60%. In several embodiments, gene editing reduces transcription of PDCD1 by at least about 70%. In several embodiments, gene editing reduces transcription of PDCD1 by at least about 80%. In several embodiments, gene editing reduces transcription of PDCD1 by at least about 90%.

[0345] In several embodiments, gene editing can reduce expression of a target protein by about 30%, about 40%, about 50%, about 60%, about 70%, about 75%, about 80%, about 85%, about 90%, about 95%, about 97%, about 98%, about 99%, or more (including any amount between those listed). In several embodiments, gene editing reduces expression of PD-1 by about 30%, about 40%, about 50%, about 60%, about 70%, about 75%, about 80%, about 85%, about 90%, about 95%, about 97%, about 98%, about 99%, or more (including any amount between those listed). In several embodiments, gene editing reduces expression of PD-1 by at least about 30%. In several embodiments, gene editing reduces expression of PD-1 by at least about 40%. In several embodiments, gene editing reduces expression of PD-1 by at least about 50%. In several embodiments, gene editing reduces expression of PD-1 by at least about 60%. In several embodiments, gene editing reduces expression of PD-1 by at least about 70%. In several embodiments, gene editing reduces expression of PD-1 by at least about 80%. In several embodiments, gene editing reduces expression of PD-1 by at least about 90%.

[0346] PD-1 plays an inhibitory role in immune regulation and down-regulates overall function by suppressing immune cell activity. Loss of expression of PD-1 in NK cells increases overall cytotoxicity due to increased secretion of interferon-gamma, granzyme B, and perforin (Niu et al., Int. J. Med. Sci. (2020) 17(13):1964-73). Similarly, T cells with loss of expression of PD-1 demonstrate increased cytotoxicity and overall caspase activation (Zhao et al., Ocotarget (2018) 9(4):5208-15). Thus, according to several embodiments, gene editing PD-1 increases the cytotoxicity, persistence, and/or otherwise enhances the efficacy of engineered NK, T, or other cell as disclosed herein.

[0347] In several embodiments, the expression of T-cell immunoglobulin and mucin-domain containing-3 (TIM-3; also known as HAVCR2) is reduced and/or eliminated in order to increase overall activation in resultant T cells and/or NK cells, or other cell type provided for herein. In several embodiments, TIM-3 is disrupted and/or knocked out using one or more of the gene editing methods disclosed herein. In several embodiments, TIM-3 is disrupted and/or knocked out using a Crispr-Cas mediated approach (e.g., Cas9), or other guided nuclease as disclosed elsewhere herein, with the nuclease guided by the use of one more of the following TIM-3-specific guide RNAs: SEQ ID NO:416-419.

[0348] In several embodiments, gene editing reduces transcription of TIM3 by about 30%, about 40%, about 50%, about 60%, about 70%, about 75%, about 80%, about 85%, about 90%, about 95%, about 97%, about 98%, about 99%, or more (including any amount between those listed). In several embodiments, gene editing reduces transcription of TIM3 by at least about 30%. In several embodiments, gene editing reduces transcription of TIM3 by at least about 40%. In several embodiments, gene editing reduces transcription of TIM3 by at least about 50%. In several embodiments, gene editing reduces transcription of TIM3 by at least about 60%. In several embodiments, gene editing reduces transcription of TIM3 by at least about 70%. In several embodiments, gene editing reduces transcription of TIM3 by at least about 80%. In several embodiments, gene editing reduces transcription of TIM3 by at least about 90%.

[0349] In several embodiments, gene editing can reduce expression of a target protein by about 30%, about 40%, about 50%, about 60%, about 70%, about 75%, about 80%, about 85%, about 90%, about 95%, about 97%, about 98%, about 99%, or more (including any amount between those listed). In several embodiments, gene editing reduces expression of TIM-3 by about 30%, about 40%, about 50%, about 60%, about 70%, about 75%, about 80%, about 85%, about 90%, about 95%, about 97%, about 98%, about 99%, or more (including any amount between those listed). In several embodiments, gene editing reduces expression of TIM-3 by at least about 30%. In several embodiments, gene editing reduces expression of TIM-3 by at least about 40%. In several embodiments, gene editing reduces expression of TIM-3 by at least about 50%. In several embodiments, gene editing reduces expression of TIM-3 by at least about 60%. In several embodiments, gene editing reduces expression of TIM-3 by at least about 70%. In several embodiments, gene editing reduces expression of TIM-3 by at least about 80%. In several embodiments, gene editing reduces expression of TIM-3 by at least about 90%.

[0350] TIM-3 is an inhibitory receptor involved in immune checkpoint function. Loss of expression of TIM-3 increases overall cytotoxicity in engineered NK and T cells as well as decreased exhaustion of NK cells and T cells, leading to increased effector function of constituent cells lacking TIM-3 expression (Pires de Silva et al., Cancer Imunol. Res. (2014) 2(5):410-22). Thus, according to several embodiments, gene editing TIM-3 increases the cytotoxicity, persistence, immune avoidance or otherwise enhances the efficacy of engineered NK, T, or other cell as disclosed herein.

[0351] In several embodiments, the expression of CD38 is reduced and/or eliminated in order to increase overall activation in resultant T cells and/or NK cells, or other cell type provided for herein. In several embodiments, CD38 is disrupted and/or knocked out using one or more of the gene editing methods disclosed herein. In several embodiments, CD38 is disrupted and/or knocked out using a Crispr-Cas mediated approach (e.g., Cas9), or other guided nuclease as disclosed elsewhere herein, with the nuclease guided by the use of one more of the following CD38-specific guide RNAs: SEQ ID NO:420-423.

[0352] In several embodiments, gene editing reduces transcription of CD38 by about 30%, about 40%, about 50%, about 60%, about 70%, about 75%, about 80%, about 85%, about 90%, about 95%, about 97%, about 98%, about 99%, or more (including any amount between those listed). In several embodiments, gene editing reduces transcription of CD38 by at least about 30%. In several embodiments, gene editing reduces transcription of CD38 by at least about 40%. In several embodiments, gene editing reduces transcription of CD38 by at least about 50%. In several embodiments, gene editing reduces transcription of CD38 by at least about 60%. In several embodiments, gene editing reduces transcription of CD38 by at least about 70%. In several embodiments, gene editing reduces transcription of CD38 by at least about 80%. In several embodiments, gene editing reduces transcription of CD38 by at least about 90%.

[0353] In several embodiments, gene editing can reduce expression of a target protein by about 30%, about 40%, about 50%, about 60%, about 70%, about 75%, about 80%, about 85%, about 90%, about 95%, about 97%, about 98%, about 99%, or more (including any amount between those listed). In several embodiments, gene editing reduces expression of CD38 by about 30%, about 40%, about 50%, about 60%, about 70%, about 75%, about 80%, about 85%, about 90%, about 95%, about 97%, about 98%, about 99%, or more (including any amount between those listed). In several embodiments, gene editing reduces expression of CD38 by at least about 30%. In several embodiments, gene editing reduces expression of CD38 by at least about 40%. In several embodiments, gene editing reduces expression of CD38 by at least about 50%. In several embodiments, gene editing reduces expression of CD38 by at least about 60%. In several embodiments, gene editing reduces expression of CD38 by at least about 70%. In several embodiments, gene editing reduces expression of CD38 by at least about 80%. In several embodiments, gene editing reduces expression of CD38 by at least about 90%.

[0354] CD38 plays a role in the maturation cycle of immune cells, and blood cancers can often present upregulated CD38. Loss of CD38 expression on constituent NK cells allows for greater cytotoxicity due to decreased fratricide (Nagai et al., Blood (2019) 134 (suppl. 1):870). Wild-type NK cells self-express CD38, leading to downstream self-targeting effects in wild-type NK cells. For T cells, loss of CD38 expression for constituent T cells leads to increased cytotoxicity. Thus, according to several embodiments, gene editing CD38 increases the cytotoxicity, persistence, and/or otherwise enhances the efficacy of engineered NK, T, or other cell as disclosed herein.

[0355] In several embodiments, the expression of T cell receptor alpha (TCR a) is reduced and/or eliminated in order to increase overall activation in resultant T cells and/or NK cells, or other cell type provided for herein. In several embodiments, TCR a is disrupted and/or knocked out using one or more of the gene editing methods disclosed herein. In several embodiments, TCR a is disrupted and/or knocked out using a Crispr-Cas mediated approach (e.g., Cas9), or other guided nuclease as disclosed elsewhere herein, with the nuclease guided by the use of one more of the following TCR a-specific guide RNAs: SEQ ID NO:467-470.

[0356] In several embodiments, gene editing reduces transcription of TRAC by about 30%, about 40%, about 50%, about 60%, about 70%, about 75%, about 80%, about 85%, about 90%, about 95%, about 97%, about 98%, about 99%, or more (including any amount between those listed). In several embodiments, gene editing reduces transcription of TRAC by at least about 30%. In several embodiments, gene editing reduces transcription of TRAC by at least about 40%. In several embodiments, gene editing reduces transcription of TRAC by at least about 50%. In several embodiments, gene editing reduces transcription of TRAC by at least about 60%. In several embodiments, gene editing reduces transcription of TRAC by at least about 70%. In several embodiments, gene editing reduces transcription of TRAC by at least about 80%. In several embodiments, gene editing reduces transcription of TRAC by at least about 90%.

[0357] In several embodiments, gene editing can reduce expression of a target protein by about 30%, about 40%, about 50%, about 60%, about 70%, about 75%, about 80%, about 85%, about 90%, about 95%, about 97%, about 98%, about 99%, or more (including any amount between those listed). In several embodiments, gene editing reduces expression of TRAC by about 30%, about 40%, about 50%, about 60%, about 70%, about 75%, about 80%, about 85%, about 90%, about 95%, about 97%, about 98%, about 99%, or more (including any amount between those listed). In several embodiments, gene editing reduces expression of TRAC by at least about 30%. In several embodiments, gene editing reduces expression of TRAC by at least about 40%. In several embodiments, gene editing reduces expression of TRAC by at least about 50%. In several embodiments, gene editing reduces expression of TRAC by at least about 60%. In several embodiments, gene editing reduces expression of TRAC by at least about 70%. In several embodiments, gene editing reduces expression of TRAC by at least about 80%. In several embodiments, gene editing reduces expression of TRAC by at least about 90%.

[0358] T cell receptors (TCR) are protein complexes found on T cells responsible for recognizing MHC molecules. Loss of certain TCRs and preferential expression of other TCRs can lead to increased cytotoxicity in engineered cells due to increased selective targeting and recognition by constituent cells. Thus, according to several embodiments, gene editing TCRs increases the cytotoxicity, persistence, and/or otherwise enhances the efficacy of engineered NK, T, or other cell as disclosed herein.

[0359] Cytokine-inducible SH2-containing protein (CIS) is a negative regulator of IL-15 signaling in NK cells, and is encoded by the CISH gene in humans. IL-15 signaling can have positive impacts on the NK cell expansion, survival, cytotoxicity and cytokine production. Thus, a disruption of CISH could render NK cells more sensitive to IL-15, thereby increasing their anti-tumor effects. In several embodiments, the expression of CISH is reduced and/or eliminated in order to increase overall activation in resultant T cells and/or NK cells, or other cell type provided for herein. It was observed in experiments described herein that disruption (e.g., knockout) of MED12—while increasing the cytotoxicity of NK cells—also tended to decrease the proliferation of such cells. However, it was surprisingly found that the effect of MED12 disruption on proliferation could be rescued by disruption (e.g., knockout) of CISH. Thus, in some aspects, it is contemplated that immune cells (e.g., NK cells) are knocked out for both MED12 and CISH. In some embodiments, the immune cells are genetically edited within a target sequence in a MED12 gene and are genetically edited within a target sequence in a CISH gene, wherein the edits yield reduced expression and/or function of the CIS and MED12 proteins encoded by the CISH and MED12 genes, respectively, as compared to an immune cell not edited within the target sequences.

[0360] In several embodiments, CISH is disrupted and/or knocked out using one or more of the gene editing methods disclosed herein. Non-limiting examples of CISH-targeting guide RNAs to reduce and/or eliminate expression of CIS (the protein encoded by CISH) are shown below in Table 11.

TABLE 11
CISH Guide RNAs

| SEQ ID | | | |
|---|---|---|---|
| NO: | Name | Sequence | Target |
| 153 | CISH-1 | CTCACCAGATTCCCGAAGGT | Exon 2 |
| 154 | CISH-2 | CCGCCTTGTCATCAACCGTC | Exon 3 |
| 155 | CISH-3 | TCTGCGTTCAGGGGTAAGCG | Exon 1 |
| 156 | CISH-4 | GCGCTTACCCCTGAACGCAG | Exon 1 |
| 157 | CISH-5 | CGCAGAGGACCATGTCCCCG | Exon 1 |
| 1012 | CISH-9 | GCAGGCACCAGGATGCCTGG | Exon 3 |
| 1013 | CISH-10 | GCATAGAGCTGGTCTCACTG | Exon 3 |

[0361] In several embodiments, CISH is disrupted and/or knocked out using a Crispr-Cas mediated approach (e.g., Cas9), or other guided nuclease as disclosed elsewhere herein, with the nuclease guided by the use of one more of the following CISH-specific guide RNAs: SEQ ID NO: 463-466, or other guide disclosed herein: SEQ ID NO 463: GCACCTACAGAAGATGCCGG; SEQ ID NO 464: GACAGCGTGAACAGGTAGCT; SEQ ID NO 465: GACAGCGTGAACAGGTAGCT; SE QID NO 466: ACTCAATGCGTACATTGGTG.

[0362] In several embodiments, gene editing reduces transcription of CISH by about 30%, about 40%, about 50%, about 60%, about 70%, about 75%, about 80%, about 85%, about 90%, about 95%, about 97%, about 98%, about 99%, or more (including any amount between those listed). In several embodiments, gene editing reduces transcription of CISH by at least about 30%. In several embodiments, gene editing reduces transcription of CISH by at least about 40%. In several embodiments, gene editing reduces transcription of CISH by at least about 50%. In several embodiments, gene editing reduces transcription of CISH by at least about 60%. In several embodiments, gene editing reduces transcription of CISH by at least about 70%. In several embodiments, gene editing reduces transcription of CISH by at least about 80%. In several embodiments, gene editing reduces transcription of CISH by at least about 90%.

[0363] In several embodiments, gene editing can reduce expression of a target protein by about 30%, about 40%, about 50%, about 60%, about 70%, about 75%, about 80%, about 85%, about 90%, about 95%, about 97%, about 98%, about 99%, or more (including any amount between those listed). In several embodiments, gene editing reduces expression of CISH by about 30%, about 40%, about 50%, about 60%, about 70%, about 75%, about 80%, about 85%, about 90%, about 95%, about 97%, about 98%, about 99%, or more (including any amount between those listed). In several embodiments, gene editing reduces expression of CISH by at least about 30%. In several embodiments, gene editing reduces expression of CISH by at least about 40%. In several embodiments, gene editing reduces expression of CISH by at least about 50%. In several embodiments, gene editing reduces expression of CISH by at least about 60%. In several embodiments, gene editing reduces expression of CISH by at least about 70%. In several embodiments, gene editing reduces expression of CISH by at least about 80%. In several embodiments, gene editing reduces expression of CISH by at least about 90%.

[0364] In CD8+ T cells, CISH actively silences TCR signaling to maintain tumor tolerance, and CISH has been shown to be a downstream negative regulator of IL-15 receptor signaling (Palmer et al., J. Exp. Med. (2015) 212(12):2095-2113). In NK and T cells, CISH plays a role in checkpoint maturation and proliferation (Delconte et al., Nature Immunol (2016) 17:816-24). Thus, according to several embodiments, gene editing CISH increases the cytotoxicity, persistence, and/or otherwise enhances the efficacy of engineered NK, T, or other cell as disclosed herein.

[0365] In several embodiments, the expression of CEACAM1 is reduced and/or eliminated in order to increase overall activation in resultant T cells and/or NK cells, or other cell type provided for herein. In several embodiments, CEACAM1 is disrupted and/or knocked out using one or more of the gene editing methods disclosed herein. In several embodiments, CEACAM1 is disrupted and/or knocked out using a Crispr-Cas mediated approach (e.g., Cas9), or other guided nuclease as disclosed elsewhere herein, with the nuclease guided by the use of one more of the following CEACAM1-specific guide RNAs: SEQ ID NO: 398-400.

[0366] In several embodiments, gene editing reduces transcription of CEACAM1 by about 30%, about 40%, about 50%, about 60%, about 70%, about 75%, about 80%, about 85%, about 90%, about 95%, about 97%, about 98%, about 99%, or more (including any amount between those listed). In several embodiments, gene editing reduces transcription of CEACAM1 by at least about 30%. In several embodiments, gene editing reduces transcription of CEACAM1 by at least about 40%. In several embodiments, gene editing reduces transcription of CEACAM1 by at least about 50%. In several embodiments, gene editing reduces transcription of CEACAM1 by at least about 60%. In several embodiments, gene editing reduces transcription of CEACAM1 by at least about 70%. In several embodiments, gene editing reduces transcription of CEACAM1 by at least about 80%. In several embodiments, gene editing reduces transcription of CEACAM1 by at least about 90%.

[0367] In several embodiments, gene editing can reduce expression of a target protein by about 30%, about 40%, about 50%, about 60%, about 70%, about 75%, about 80%, about 85%, about 90%, about 95%, about 97%, about 98%, about 99%, or more (including any amount between those listed). In several embodiments, gene editing reduces expression of CEACAM1 by about 30%, about 40%, about 50%, about 60%, about 70%, about 75%, about 80%, about 85%, about 90%, about 95%, about 97%, about 98%, about 99%, or more (including any amount between those listed). In several embodiments, gene editing reduces expression of CEACAM1 by at least about 30%. In several embodiments, gene editing reduces expression of CEACAM1 by at least about 40%. In several embodiments, gene editing reduces expression of CEACAM1 by at least about 50%. Tn several embodiments, gene editing reduces expression of CEACAM1 by at least about 60%. In several embodiments, gene editing reduces expression of CEACAM1 by at least about 70%. In several embodiments, gene editing reduces expression of CEACAM1 by at least about 80%. In several embodiments, gene editing reduces expression of CEACAM1 by at least about 90%.

[0368] CEACAM1 is an immune checkpoint for both NK and T cells and can inhibit lysis of CEACAM1-bearing tumor cell lines. Loss of expression of CEACAM1 can increase overall cytotoxicity for NK and T cells (Markel et al., J. Clin. Oncol. (2016) 34(suppl. 15):3044). Thus, according to several embodiments, gene editing CEACAM1 increases the cytotoxicity, persistence, and/or otherwise enhances the efficacy of engineered NK, T, or other cell as disclosed herein.

[0369] In several embodiments, the expression of DDIT4 is reduced and/or eliminated in order to increase overall activation in resultant T cells and/or NK cells, or other cell type provided for herein. In several embodiments, DDIT4 is disrupted and/or knocked out using one or more of the gene editing methods disclosed herein. In several embodiments, DDIT4 is disrupted and/or knocked out using a Crispr-Cas mediated approach (e.g., Cas9), or other guided nuclease as disclosed elsewhere herein, with the nuclease guided by the use of one more of the following DDIT4-specific guide RNAs: SEQ ID NO: 401-403.

[0370] In several embodiments, gene editing reduces transcription of DDIT4 by about 30%, about 40%, about 50%, about 60%, about 70%, about 75%, about 80%, about 85%, about 90%, about 95%, about 97%, about 98%, about 99%, or more (including any amount between those listed). In several embodiments, gene editing reduces transcription of DDIT4 by at least about 30%. In several embodiments, gene editing reduces transcription of DDIT4 by at least about 40%. In several embodiments, gene editing reduces transcription of DDIT4 by at least about 50%. In several embodiments, gene editing reduces transcription of DDIT4 by at least about 60%. In several embodiments, gene editing reduces transcription of DDIT4 by at least about 70%. In several embodiments, gene editing reduces transcription of DDIT4 by at least about 80%. In several embodiments, gene editing reduces transcription of DDIT4 by at least about 90%.

[0371] In several embodiments, gene editing can reduce expression of a target protein by about 30%, about 40%, about 50%, about 60%, about 70%, about 75%, about 80%, about 85%, about 90%, about 95%, about 97%, about 98%, about 99%, or more (including any amount between those listed). In several embodiments, gene editing reduces expression of DDIT4 by about 30%, about 40%, about 50%, about 60%, about 70%, about 75%, about 80%, about 85%, about 90%, about 95%, about 97%, about 98%, about 99%, or more (including any amount between those listed). In several embodiments, gene editing reduces expression of DDIT4 by at least about 30%. In several embodiments, gene editing reduces expression of DDIT4 by at least about 40%. In several embodiments, gene editing reduces expression of DDIT4 by at least about 50%. In several embodiments, gene editing reduces expression of DDIT4 by at least about 60%. In several embodiments, gene editing reduces expression of DDIT4 by at least about 70%. In several embodiments, gene editing reduces expression of DDTT4 by at least about 80%. In several embodiments, gene editing reduces expression of DDIT4 by at least about 90%.

[0372] In NK and T cells, DDIT4 is a negative regulator of mTORC1, which itself enhances IL-15 mediated survival and proliferation of NK cells. Moreover, DDIT4 is upregulated by oxidative stress conditions as is common in tumor microenvironments. Loss of DDIT4 function in engineered cells may increase overall glucose metabolism leading to enhanced proliferation, as well as increasing overall NK or T cell cytotoxicity. Thus, according to several embodiments, gene editing DDIT4 increases the cytotoxicity, persistence, and/or otherwise enhances the efficacy of engineered NK, T, or other cell as disclosed herein.

[0373] In several embodiments, the expression of MAPKAP Kinase 3 (MAPKAPK3) is reduced and/or eliminated in order to increase overall activation in resultant T cells and/or NK cells, or other cell type provided for herein. In several embodiments, MAPKAPK3 is disrupted and/or knocked out using one or more of the gene editing methods disclosed herein. In several embodiments, MAPKAPK3 is disrupted and/or knocked out using a Crispr-Cas mediated approach (e.g., Cas9), or other guided nuclease as disclosed elsewhere herein, with the nuclease guided by the use of one more of the following MAPKAPK3-specific guide RNAs: SEQ ID NO: 395-397.

[0374] In several embodiments, gene editing reduces transcription of MAPKAPK3 by about 30%, about 40%, about 50%, about 60%, about 70%, about 75%, about 80%, about 85%, about 90%, about 95%, about 97%, about 98%, about 99%, or more (including any amount between those listed). In several embodiments, gene editing reduces transcription of MAPKAPK3 by at least about 30%. In several embodiments, gene editing reduces transcription of MAPKAPK3 by at least about 40%. In several embodiments, gene editing reduces transcription of MAPKAPK3 by at least about 50%. In several embodiments, gene editing reduces transcription of MAPKAPK3 by at least about 60%. In several embodiments, gene editing reduces transcription of MAPKAPK3 by at least about 70%. In several embodiments, gene editing reduces transcription of MAPKAPK3 by at least about 80%. In several embodiments, gene editing reduces transcription of MAPKAPK3 by at least about 90%.

[0375] In several embodiments, gene editing reduces expression of MAPKAPK3 by about 30%, about 40%, about 50%, about 60%, about 70%, about 75%, about 80%, about 85%, about 90%, about 95%, about 97%, about 98%, about 99%, or more (including any amount between those listed). In several embodiments, gene editing reduces expression of MAPKAPK3 by at least about 30%. In several embodiments, gene editing reduces expression of MAPKAPK3 by at least about 40%. In several embodiments, gene editing reduces expression of MAPKAPK3 by at least about 50%. In several embodiments, gene editing reduces expression of MAPKAPK3 by at least about 60%. In several embodiments, gene editing reduces expression of MAPKAPK3 by at least about 70%. In several embodiments, gene editing reduces expression of MAPKAPK3 by at least about 80%. In several embodiments, gene editing reduces expression of DDIT4 by at least about 90%.

[0376] In several embodiments, gene editing can reduce expression of a target protein by about 30%, about 40%, about 50%, about 60%, about 70%, about 75%, about 80%, about 85%, about 90%, about 95%, about 97%, about 98%, about 99%, or more (including any amount between those listed). MAPKAP Kinase 3 in expressed in both NK and T cells. Loss of MAPKAPK3 in engineered cells is expected to increase cytotoxicity, cytokine secretion, and overall NK signaling. Thus, according to several embodiments, gene editing MAPKAPK3 increases the cytotoxicity, persistence, and/or otherwise enhances the efficacy of engineered NK, T, or other cell as disclosed herein.

[0377] In several embodiments, the expression of SMAD3 is reduced and/or eliminated in order to increase overall activation in resultant T cells and/or NK cells, or other cell type provided for herein. In several embodiments, SMAD3 is disrupted and/or knocked out using one or more of the gene editing methods disclosed herein. In several embodiments, SMAD3 is disrupted and/or knocked out using a Crispr-Cas mediated approach (e.g., Cas9), or other guided nuclease as disclosed elsewhere herein, with the nuclease guided by the use of one more of the following SMAD3-specific guide RNAs: SEQ ID NO: 392-394.

[0378] In several embodiments, gene editing reduces transcription of SMAD3 by about 30%, about 40%, about 50%, about 60%, about 70%, about 75%, about 80%, about 85%, about 90%, about 95%, about 97%, about 98%, about 99%, or more (including any amount between those listed). In several embodiments, gene editing reduces transcription of SMAD3 by at least about 30%. In several embodiments, gene editing reduces transcription of SMAD3 by at least about 40%. In several embodiments, gene editing reduces transcription of SMAD3 by at least about 50%. In several embodiments, gene editing reduces transcription of SMAD3 by at least about 60%. In several embodiments, gene editing reduces transcription of SMAD3 by at least about 70%. In several embodiments, gene editing reduces transcription of SMAD3 by at least about 80%. In several embodiments, gene editing reduces transcription of SMAD3 by at least about 90%.

[0379] In several embodiments, gene editing can reduce expression of a target protein by about 30%, about 40%, about 50%, about 60%, about 70%, about 75%, about 80%, about 85%, about 90%, about 95%, about 97%, about 98%, about 99%, or more (including any amount between those listed). In several embodiments, gene editing reduces expression of SMAD3 by about 30%, about 40%, about 50%, about 60%, about 70%, about 75%, about 80%, about 85%, about 90%, about 95%, about 97%, about 98%, about 99%, or more (including any amount between those listed). In several embodiments, gene editing reduces expression of SMAD3 by at least about 30%. In several embodiments, gene editing reduces expression of SMAD3 by at least about 40%. In several embodiments, gene editing reduces expression of SMAD3 by at least about 50%. In several embodiments, gene editing reduces expression of SMAD3 by at least about 60%. In several embodiments, gene editing reduces expression of SMAD3 by at least about 70%. In several embodiments, gene editing reduces expression of SMAD3 by at least about 80%. In several embodiments, gene editing reduces expression of SMAD3 by at least about 90%.

[0380] SMAD3 is a downstream mediator of TGF-Beta and Activin A signaling. Inhibition of activin A provides an effective downstream TGFBR knockout. Smad3 silenced NK cells demonstrate increased proliferation and differentiation, as well as increased cytotoxicity in engineered T and NK cells (Tang et al., Nat. Commun. (2017) 8:14677). Thus, according to several embodiments, gene editing SMAD3 increases the cytotoxicity, persistence, and/or otherwise enhances the efficacy of engineered NK, T, or other cell as disclosed herein.

[0381] As discussed above, genetically edited cells can be edited at a plurality of locations. For example in several embodiments, cells (e.g., NK cells or T cells, or a mixture thereof) are edited at two locations. In several embodiments, one of the gene edits is made at a target site in the CISH gene. In several embodiments, one of the gene edits is made at a target site in the CBLB gene. In several embodiments, one of the gene edits is made at a target site in the TGFBR2 gene. In several embodiments, one of the gene edits is made at a target site in the TIGIT gene. Any combination of such edits is also within the provided embodiments, for example dual TGFBR2/CBLB, dual TIGIT/TGFBR2, CISH/CBLB, CISH/TGFBR2, CISH/TIGIT, etc. Moreover, any combination of edits of any of the target genes for editing (e.g., by Crispr or other nuclease) can be made according to some embodiments. Additionally, to the extent necessary to achieve a desired amount of reduction in gene expression, multiple edits may be made within a single target gene, or genes.

[0382] In several embodiments, gene edits are made at a target site in a CISH gene and a target site in a CBLB gene. In some embodiments, a double edit, e.g., CISH/CBLB is made in NK cells and/or T cells for use in therapy. In several embodiments, a combination CISH/CBLB gene edit is made in an NK cell that does not include an edit at a CD70 gene. In several embodiments, a combination CISH/CBLB gene edit is made in an NK cell that does not include an edit at any additional gene. In several embodiments, a combination CISH/CBLB gene edit is made in an NK cell that does not express any one or combination of any of an anti-CD70 CAR, an anti-CD19 CAR, or an anti-NKG2D chimeric receptor. In some embodiments, a triple edit, e.g., CD70/CISH/CBLB is made in NK cells and/or T cells for use in therapy. In some embodiments, a triple edit, e.g., CD70/CISH/CBLB is made in NK cells and/or T cells that are engineered to express a tumor-targeting CAR.

[0383] In several embodiments, gene edits are made at a target site in a CISH gene and a target site in a MED12 gene. In some embodiments, a double edit, e.g., CISH/MED12 is made in NK cells and/or T cells. In several embodiments, a combination CISH/MED12 gene edit is made in NK cells. In several embodiments, a combination CISH/MED12 gene edit is made in an NK cell that does not include an edit at a CD70 gene. In several embodiments, a combination CISH/MED12 gene edit is made in an NK cell that does not include an edit at any additional gene. In several embodiments, a combination CISH/MED12 gene edit is made in an NK cell that does not express any one or combination of any of an anti-CD70 CAR, an anti-CD19 CAR, or an anti-NKG2D chimeric receptor. In several embodiments, a combination CISH/MED12 gene edit is made in an NK cell that expresses a CD19-targeting CAR. In several embodiments, a combination CISH/MED12 gene edit is made in an NK cell that expresses a CD70-targeting CAR. In several embodiments, a combination CISH/MED12 gene edit is made in an NK cell that expresses a BCMA-targeting CAR.

[0384] In several embodiments, gene edits are made at a target site in a CISH gene, a target site in a CBLB gene, and a target site in a MED12 gene. In some embodiments, a triple edit, e.g., CBLB/CISH/MED12, is made in NK cells and/or T cells. In some embodiments, a triple edit, e.g., CBLB/CISH/MED12, is made in NK cells. In several embodiments, a combination CISH/MED12/CBLB gene edit is made in an NK cell that does not include an edit at a CD70 gene. In several embodiments, a combination CISH/MED12/CBLB gene edit is made in an NK cell that does not include an edit at any additional gene. In several embodiments, a combination CISH/MED12/CBLB gene edit is made in an NK cell that does not express any one or combination of any of an anti-CD70 CAR, an anti-CD19 CAR, or an anti-NKG2D chimeric receptor. In some embodiments, a triple edit, e.g., CBLB/CISH/MED12, is made in NK cells that express a CD19-targeting CAR. In some embodiments, a triple edit, e.g., CBLB/CISH/MED12, is made in NK cells that express a CD70-targeting CAR. In some embodiments, a triple edit, e.g., CBLB/CISH/MED12, is made in NK cells that express a BCMA-targeting CAR.

[0385] In several embodiments, gene edits are made at a target site in a CISH gene and a target site in a TGFBR2 gene. In some embodiments, a double edit, e.g., CISH/TGFBR2 is made in NK cells and/or T cells for use in therapy. In several embodiments, a combination CISH/TGFBR2 gene edit is made in an NK cell that does not include an edit at a CD70 gene. In several embodiments, a combination CISH/TGFBR2 gene edit is made in an NK cell that does not include an edit at any additional gene. In several embodiments, a combination CISH/TGFBR2 gene edit is made in an NK cell that does not express any one or combination of any of an anti-CD70 CAR, an anti-CD19 CAR, or an anti-NKG2D chimeric receptor. In some embodiments, a triple edit, e.g., CD70/CISH/TGFBR2 is made in NK cells and/or T cells for use in therapy. In some embodiments, a triple edit, e.g., CD70/CISH/TGFBR2 is made in NK cells and/or T cells that are engineered to express a tumor-targeting CAR.

[0386] In several embodiments, gene edits are made at a target site in a CISH gene and a target site in a TIGIT gene. In some embodiments, a double edit, e.g., CISH/TIGIT is made in NK cells and/or T cells for use in therapy. In several embodiments, a combination CISH/TIGIT gene edit is made in an NK cell that does not include an edit at a CD70 gene. In several embodiments, a combination CISH/TIGIT gene edit is made in an NK cell that does not include an edit at any additional gene. In several embodiments, a combination CISH/TIGIT gene edit is made in an NK cell that does not express any one or combination of any of an anti-CD70 CAR, an anti-CD19 CAR, or an anti-NKG2D chimeric receptor. In some embodiments, a triple edit, e.g., CD70/CISH/TIGIT is made in NK cells and/or T cells for use in therapy. In some embodiments, a triple edit, e.g., CD70/CISH/TIGIT is made in NK cells and/or T cells that are engineered to express a tumor-targeting CAR.

### Extracellular Domains (Tumor Binder)

[0387] Some embodiments of the compositions and methods described herein relate to a chimeric antigen receptor that includes an extracellular domain that comprises a tumor-binding domain (also referred to as an antigen-binding protein or antigen-binding domain) as described herein. The tumor binding domain, depending on the embodiment, targets, for example CD19, CD123, CD70, Her2, mesothelin, Claudin 6, BCMA, EGFR, among others. In some embodiments, the tumor binding domain binds CD19. In some embodiments, the tumor binding domain binds CD70. In some embodiments, the tumor binding domain binds BCMA. Several embodiments of the compositions and methods described herein relate to a chimeric receptor that includes an extracellular domain that comprises a ligand binding domain that binds a ligand expressed by a tumor cell (also referred to as an activating chimeric receptor) as described herein. In some embodiments, the ligand binding domain binds to a ligand of NKG2D. The ligand binding domain, depending on the embodiment, targets for example MICA, MICB, ULBP1, ULBP2, ULBP3, ULBP4, ULBP5, and ULBP6 (among others).

[0388] In some embodiments, the antigen-binding domain is derived from or comprises wild-type or non-wild-type sequence of an antibody, an antibody fragment, an scFv, a Fv, a Fab, a (Fab′)2, a single domain antibody (sdAB), a vH or vL domain, a camelid VHH domain, or a non-immunoglobulin scaffold such as a DARPIN, an affibody, an affilin, an adnectin, an affitin, a repebody, a fynomer, an alphabody, an avimer, an atrimer, a centyrin, a pronectin, an anticalin, a kunitz domain, an Armadillo repeat protein, an autoantigen, a receptor or a ligand. In some embodiments, the tumor-binding domain contains more than one antigen binding domain. In embodiments, the antigen-binding domain is operably linked directly or via an optional linker to the NH2-terminal end of a TCR domain (e.g. constant chains of TCR-alpha, TCR-betal, TCR-beta2, preTCR-alpha, pre-TCR-alpha-Del48, TCR-gamma, or TCR-delta).

### Antigen-Binding Proteins

[0389] There are provided, in several embodiments, antigen-binding proteins. Also provided, in several embodiments, are chimeric receptors (e.g., CARs) comprising antigen-binding proteins. As used herein, the term “antigen-binding protein” shall be given its ordinary meaning, and shall also refer to a protein comprising an antigen-binding fragment that binds to an antigen and, optionally, a scaffold or framework portion that allows the antigen-binding fragment to adopt a conformation that promotes binding of the antigen-binding protein to the antigen. In some embodiments, the antigen is a cancer antigen (e.g., CD19) or a fragment thereof. In some embodiments, the antigen-binding fragment comprises at least one CDR from an antibody that binds to the antigen. In some embodiments, the antigen-binding fragment comprises all three CDRs from the heavy chain of an antibody that binds to the antigen or from the light chain of an antibody that binds to the antigen. In some embodiments, the antigen-binding fragment is a heavy chain-only antibody, such as a camelid antibody (e.g., V_{H}H). In still some embodiments, the antigen-binding fragment comprises all six CDRs from an antibody that binds to the antigen (three from the heavy chain and three from the light chain). In some embodiments, the antigen-binding fragment comprises a heavy chain variable region (VH) and a light chain variable region (VL) (e.g., a Fv or a scFv). In several embodiments, the antigen-binding fragment comprises one, two, three, four, five, or six CDRs from an antibody that binds to the antigen, and in several embodiments, the CDRs can be any combination of heavy and/or light chain CDRs. The antigen-binding fragment in some embodiments is an antibody fragment.

[0390] Nonlimiting examples of antigen-binding proteins include antibodies, antibody fragments (e.g., an antigen-binding fragment of an antibody), antibody derivatives, and antibody analogs. Further specific examples include, but are not limited to, a single-chain variable fragment (scFv), a nanobody (e.g. VH domain of camelid heavy chain antibodies; VHH fragment,), a Fab fragment, a Fab′ fragment, a F(ab′)₂ fragment, a Fv fragment, a Fd fragment, and a complementarity determining region (CDR) fragment. In some embodiments, the antigen-binding fragment is a Fab. In some embodiments, the antigen-binding fragment is a Fab′ fragment. In some embodiments, the antigen-binding fragment is a F(ab′)₂ fragment. In some embodiments, the antigen-binding fragment is a Fd fragment. In some embodiments, the antigen-binding fragment is a Fv. In some embodiments, the antigen-binding fragment comprises a linker between the VH and VL In some embodiments, the antigen-binding fragment is a single-chain variable fragment (scFv). These molecules can be derived from any mammalian source, such as human, mouse, rat, rabbit, or pig, dog, or camelid. Antibody fragments may compete for binding of a target antigen with an intact (e.g., native) antibody and the fragments may be produced by the modification of intact antibodies (e.g. enzymatic or chemical cleavage) or synthesized de novo using recombinant DNA technologies or peptide synthesis. The antigen-binding protein can comprise, for example, an alternative protein scaffold or artificial scaffold with grafted CDRs or CDR derivatives. Such scaffolds include, but are not limited to, antibody-derived scaffolds comprising mutations introduced to, for example, stabilize the three-dimensional structure of the antigen-binding protein as well as wholly synthetic scaffolds comprising, for example, a biocompatible polymer. In addition, peptide antibody mimetics (“PAMs”) can be used, as well as scaffolds based on antibody mimetics utilizing fibronectin components as a scaffold.

[0391] In some embodiments, the antigen-binding protein comprises one or more antibody fragments incorporated into a single polypeptide chain or into multiple polypeptide chains. For instance, antigen-binding proteins can include, but are not limited to, a diabody; an intrabody; a domain antibody (single VL or VH domain or two or more VH domains joined by a peptide linker;); a maxibody (2 scFvs fused to Fe region); a triabody; a tetrabody; a minibody (scFv fused to CH3 domain); a peptibody (one or more peptides attached to an Fe region); a linear antibody (a pair of tandem Fd segments (VH-CH1-VH-CH1) which, together with complementary light chain polypeptides, form a pair of antigen binding regions); a small modular immunopharmaceutical; and immunoglobulin fusion proteins (e.g. IgG-scFv, IgG-Fab, 2scFv-IgG, 4scFv-IgG, VH-IgG, IgG-VH, and Fab-scFv-Fc).

[0392] In some embodiments, the antigen-binding protein has the structure of an immunoglobulin. As used herein, the term “immunoglobulin” shall be given its ordinary meaning, and shall also refer to a tetrameric molecule, with each tetramer comprising two identical pairs of polypeptide chains, each pair having one “light” (about 25 kDa) and one “heavy” chain (about 50-70 kDa). The amino-terminal portion of each chain includes a variable region of about 100 to 110 or more amino acids primarily responsible for antigen recognition. The carboxy-terminal portion of each chain defines a constant region primarily responsible for effector function.

[0393] Within light and heavy chains, the variable (V) and constant regions (C) are joined by a “J” region of about 12 or more amino acids, with the heavy chain also including a “D” region of about 10 more amino acids. The variable regions of each light/heavy chain pair form the antibody binding site such that an intact immunoglobulin has two binding sites.

[0394] Immunoglobulin chains exhibit the same general structure of relatively conserved framework regions (FR) joined by three hypervariable regions, also called complementarity determining regions or CDRs. From N-terminus to C-terminus, both light and heavy chains comprise the domains FR1, CDR1, FR2, CDR2, FR3, CDR3 and FR4.

[0395] Human light chains are classified as kappa and lambda light chains. An antibody “light chain”, refers to the smaller of the two types of polypeptide chains present in antibody molecules in their naturally occurring conformations. Kappa (K) and lambda (λ) light chains refer to the two major antibody light chain isotypes. A light chain may include a polypeptide comprising, from amino terminus to carboxyl terminus, a single immunoglobulin light chain variable region (VL) and a single immunoglobulin light chain constant domain (CL).

[0396] Heavy chains are classified as mu (μ), delta (Δ), gamma (γ), alpha (α), and epsilon (ε), and define the antibody's isotype as IgM, IgD, IgG, IgA, and IgE, respectively. An antibody “heavy chain” refers to the larger of the two types of polypeptide chains present in antibody molecules in their naturally occurring conformations, and which normally determines the class to which the antibody belongs. A heavy chain may include a polypeptide comprising, from amino terminus to carboxyl terminus, a single immunoglobulin heavy chain variable region (VH), an immunoglobulin heavy chain constant domain 1 (CH1), an immunoglobulin hinge region, an immunoglobulin heavy chain constant domain 2 (CH2), an immunoglobulin heavy chain constant domain 3 (CH3), and optionally an immunoglobulin heavy chain constant domain 4 (CH4).

[0397] The IgG-class is further divided into subclasses, namely, IgG1, IgG2, IgG3, and IgG4. The IgA-class is further divided into subclasses, namely IgA1 and IgA2. The IgM has subclasses including, but not limited to, IgM1 and IgM2. The heavy chains in IgG, IgA, and IgD antibodies have three domains (CH1, CH2, and CH3), whereas the heavy chains in IgM and IgE antibodies have four domains (CHI, CH2, CH3, and CH4). The immunoglobulin heavy chain constant domains can be from any immunoglobulin isotype, including subtypes. The antibody chains are linked together via inter-polypeptide disulfide bonds between the CL domain and the CH1 domain (e.g., between the light and heavy chain) and between the hinge regions of the antibody heavy chains.

[0398] In some embodiments, the antigen-binding protein is an antibody. The term “antibody”, as used herein, refers to a protein, or polypeptide sequence derived from an immunoglobulin molecule which specifically binds with an antigen. Antibodies can be monoclonal, or polyclonal, multiple or single chain, or intact immunoglobulins, and may be derived from natural sources or from recombinant sources. Antibodies can be tetramers of immunoglobulin molecules. The antibody may be “humanized”, “chimeric” or non-human. An antibody may include an intact immunoglobulin of any isotype, and includes, for instance, chimeric, humanized, human, and bispecific antibodies. An intact antibody will generally comprise at least two full-length heavy chains and two full-length light chains. Antibody sequences can be derived solely from a single species, or can be “chimeric.” that is, different portions of the antibody can be derived from two different species as described further below. Unless otherwise indicated, the term “antibody” also includes antibodies comprising two substantially full-length heavy chains and two substantially full-length light chains provided the antibodies retain the same or similar binding and/or function as the antibody comprised of two full length light and heavy chains. For example, antibodies having 1, 2, 3, 4, or 5 amino acid residue substitutions, insertions or deletions at the N-terminus and/or C-terminus of the heavy and/or light chains are included in the definition provided that the antibodies retain the same or similar binding and/or function as the antibodies comprising two full length heavy chains and two full length light chains. Examples of antibodies include monoclonal antibodies, polyclonal antibodies, chimeric antibodies, humanized antibodies, human antibodies, bispecific antibodies, and synthetic antibodies. There is provided, in some embodiments, monoclonal and polyclonal antibodies. As used herein, the term “polyclonal antibody” shall be given its ordinary meaning, and shall also refer to a population of antibodies that are typically widely varied in composition and binding specificity. As used herein, the term “monoclonal antibody” (“mAb”) shall be given its ordinary meaning, and shall also refer to one or more of a population of antibodies having identical sequences. Monoclonal antibodies bind to the antigen at a particular epitope on the antigen.

[0399] In some embodiments, the antigen-binding protein is a fragment or antigen-binding fragment of an antibody. The term “antibody fragment” refers to at least one portion of an antibody, that retains the ability to specifically interact with (e.g., by binding, steric hindrance, stabilizing/destabilizing, spatial distribution) an epitope of an antigen. Examples of antibody fragments include, but are not limited to, Fab, Fab′, F(ab′)₂, Fv fragments, scFv antibody fragments, disulfide-linked Fvs (sdFv), a Fd fragment consisting of the VH and CHI domains, linear antibodies, single domain antibodies such as sdAb (either vL or vH), camelid V_{H}H domains, multi-specific antibodies formed from antibody fragments such as a bivalent fragment comprising two Fab fragments linked by a disulfide bridge at the hinge region, and an isolated CDR or other epitope binding fragments of an antibody. An antigen binding fragment can also be incorporated into single domain antibodies, maxibodies, minibodies, nanobodies, intrabodies, diabodies, triabodies, tetrabodies, v-NAR and bis-scFv (see, e.g., Hollinger and Hudson, Nature Biotechnology 23: 1126-1136, 2005). Antigen binding fragments can also be grafted into scaffolds based on polypeptides such as a fibronectin type III (Fn3)(see U.S. Pat. No. 6,703,199, which describes fibronectin polypeptide mini bodies). An antibody fragment may include a Fab, Fab′, F(ab′)2, and/or Fv fragment that contains at least one CDR of an immunoglobulin that is sufficient to confer specific antigen binding to a cancer antigen (e.g., CDI 9). Antibody fragments may be produced by recombinant DNA techniques or by enzymatic or chemical cleavage of intact antibodies.

[0400] In some embodiments, Fab fragments are provided. A Fab fragment is a monovalent fragment having the VL, VH, CL and CHI domains; a F(ab′)2 fragment is a bivalent fragment having two Fab fragments linked by a disulfide bridge at the hinge region; a Fd fragment has the VH and CH1 domains; an Fv fragment has the VL and VH domains of a single arm of an antibody; and a dAb fragment has a VH domain, a VL domain, or an antigen-binding fragment of a VH or VL domain. In some embodiments, these antibody fragments can be incorporated into single domain antibodies (e.g., V_{H}Hs), single-chain antibodies, maxibodies, minibodies, intrabodies, diabodies, triabodies, tetrabodies, v-NAR and bis-scFv. In some embodiments, the antibodies comprise at least one CDR as described herein.

[0401] There is also provided for herein, in several embodiments, single-chain variable fragments. As used herein, the term “single-chain variable fragment” (“scFv”) shall be given its ordinary meaning, and shall also refer to a fusion protein in which a VL and a VH region are joined via a linker (e.g., a synthetic sequence of amino acid residues) to form a continuous protein chain wherein the linker is long enough to allow the protein chain to fold back on itself and form a monovalent antigen binding site). For the sake of clarity, unless otherwise indicated as such, a “single-chain variable fragment” is not an antibody or an antibody fragment as defined herein. Diabodies are bivalent antibodies comprising two polypeptide chains, wherein each polypeptide chain comprises VH and VL domains joined by a linker that is configured to reduce or not allow for pairing between two domains on the same chain, thus allowing each domain to pair with a complementary domain on another polypeptide chain. According to several embodiments, if the two polypeptide chains of a diabody are identical, then a diabody resulting from their pairing will have two identical antigen binding sites. Polypeptide chains having different sequences can be used to make a diabody with two different antigen binding sites. Similarly, tribodies and tetrabodies are antibodies comprising three and four polypeptide chains, respectively, and forming three and four antigen binding sites, respectively, which can be the same or different.

[0402] In several embodiments, the antigen-binding protein comprises one or more CDRs. As used herein, the term “CDR” shall be given its ordinary meaning, and shall also refer to the complementarity determining region (also termed “minimal recognition units” or “hypervariable region”) within antibody variable sequences. The CDRs permit the antigen-binding protein to specifically bind to a particular antigen of interest. There are three heavy chain variable region CDRs (CDRH1, CDRH2 and CDRH3) and three light chain variable region CDRs (CDRL1, CDRL2 and CDRL3). The CDRs in each of the two chains typically are aligned by the framework regions to form a structure that binds specifically to a specific epitope or domain on the target protein. From N-terminus to C-terminus, naturally-occurring light and heavy chain variable regions both typically conform to the following order of these elements: FRI, CDR1, FR2, CDR2, FR3, CDR3 and FR4. A numbering system has been devised for assigning numbers to amino acids that occupy positions in each of these domains. This numbering system is defined in Kabat Sequences of Proteins of Immunological Interest (1987 and 1991, NIH, Bethesda, MD), or Chothia & Lesk, 1987, J. Mol. Biol. 196:901-917; Chothia et al., 1989, Nature 342:878-883. Complementarity determining regions (CDRs) and framework regions (FR) of a given antibody may be identified using this system. Other numbering systems for the amino acids in immunoglobulin chains include IMGT® (the international ImMunoGeneTics information system; Lefranc et al, Dev. Comp. Immunol. 29:185-203; 2005) and AHo (Honegger and Pluckthun, J. Mol. Biol. 309(3):657-670; 2001). One or more CDRs may be incorporated into a molecule either covalently or noncovalently to make it an antigen-binding protein.

[0403] In some embodiments, the antigen-binding protein comprises the CDR-H1, the CDR-H2, and the CDR-H3 of any VH sequence provided herein; and the CDR-L1, CDR-L2, and CDR-L3 of any VL sequence provided herein. In some embodiments, the VH comprises the CDR-H1, the CDR-H2, and the CDR-H3 of any VH sequence provided herein; and the VL comprises the CDR-L1, the CDR-L2, and the CDR-L3 of any VL sequence provided herein.

[0404] In some embodiments, the antigen-binding proteins provided herein comprise one or more CDR(s) as part of a larger polypeptide chain. In some embodiments, the antigen-binding proteins covalently link the one or more CDR(s) to another polypeptide chain. In some embodiments, the antigen-binding proteins incorporate the one or more CDR(s) noncovalently. In some embodiments, the antigen-binding proteins may comprise at least one of the CDRs described herein incorporated into a biocompatible framework structure. In some embodiments, the biocompatible framework structure comprises a polypeptide or portion thereof that is sufficient to form a conformationally stable structural support, or framework, or scaffold, which is able to display one or more sequences of amino acids that bind to an antigen (e.g., CDRs, a variable region, etc.) in a localized surface region. Such structures can be a naturally occurring polypeptide or polypeptide “fold” (a structural motif), or can have one or more modifications, such as additions, deletions and/or substitutions of amino acids, relative to a naturally occurring polypeptide or fold. Depending on the embodiment, the scaffolds can be derived from a polypeptide of a variety of different species (or of more than one species), such as a human, a non-human primate or other mammal, other vertebrate, invertebrate, plant, bacteria or virus.

[0405] Depending on the embodiment, the biocompatible framework structures are based on protein scaffolds or skeletons other than immunoglobulin domains. In some such embodiments, those framework structures are based on fibronectin, ankyrin, lipocalin, neocarzinostain, cytochrome b, CPI zinc finger, PST1, coiled coil, LACI-D1, Z domain and/or tendamistat domains.

[0406] There is also provided, in some embodiments, antigen-binding proteins with more than one binding site. In several embodiments, the binding sites are identical to one another while in some embodiments the binding sites are different from one another. For example, an antibody typically has two identical binding sites, while a “bispecific” or “bifunctional” antibody has two different binding sites. The two binding sites of a bispecific antigen-binding protein or antibody will bind to two different epitopes, which can reside on the same or different protein targets. In several embodiments, this is particularly advantageous, as a bispecific chimeric antigen receptor can impart to an engineered cell the ability to target multiple tumor markers. For example, CD19 and an additional tumor marker, such as CD123, CD70, Her2, mesothelin, Claudin 6, BCMA, EGFR, MICA, MICB, ULBP1, ULBP2, ULBP3, ULBP4, ULBP5, and ULBP6, among others, or any other marker disclosed herein or appreciated in the art as a tumor specific antigen or tumor associated antigen can be bound by a bispecific antibody.

[0407] As used herein, the term “chimeric antibody” shall be given its ordinary meaning, and shall also refer to an antibody that contains one or more regions from one antibody and one or more regions from one or more other antibodies. In some embodiments, one or more of the CDRs are derived from an anti-cancer antigen (e.g., CD19, CD123, CD70, Her2, mesothelin, PD-L1, Claudin 6, BCMA, CD138, EGFR, etc.) antibody. In several embodiments, all of the CDRs are derived from an anti-cancer antigen antibody (such as an anti-CD19 antibody). In some embodiments, the CDRs from more than one anti-cancer antigen antibodies are mixed and matched in a chimeric antibody. For instance, a chimeric antibody may comprise a CDR1 from the light chain of a first anti-cancer antigen antibody, a CDR2 and a CDR3 from the light chain of a second anti-cancer antigen antibody, and the CDRs from the heavy chain from a third anti-cancer antigen antibody. Further, the framework regions of antigen-binding proteins disclosed herein may be derived from one of the same anti-cancer antigen (e.g., CD19, CD123, CD70, Her2, mesothelin, Claudin 6, BCMA, EGFR, etc.) antibodies, from one or more different antibodies, such as a human antibody, or from a humanized antibody. In one example of a chimeric antibody, a portion of the heavy and/or light chain is identical with, homologous to, or derived from an antibody from a particular species or belonging to a particular antibody class or subclass, while the remainder of the chain(s) is/are identical with, homologous to, or derived from an antibody or antibodies from another species or belonging to another antibody class or subclass. In some embodiments, an antigen-binding domain comprises a heavy chain variable region (VH) and a light chain variable region (VL), wherein the VH comprises the CDR-H1, the CDR-H2, and the CDR-H3 as comprised within any of the VH regions provided herein, and the VL comprises the CDR-L1, the CDR-L2, and the CDR-L3 comprised within any of the VL regions provided herein.

[0408] Also provided herein are fragments of such antibodies that exhibit the desired biological activity.

### CD38

[0409] In several embodiments, an antigen binding protein is directed against CD38 (also known as ADP-ribosyl cyclase 1, cADPr hydrolase 1, Cyclic ADP-ribose hydrolase 1, or T10).

[0410] According to one embodiment, the CD38 antigen binding protein is an antigen binding domain of a CAR which comprises a transmembrane domain, a signaling domain, and optionally a co-stimulatory domain as disclosed herein. In several embodiments, the antigen binding protein binds to an epitope of the human CD38, and in particular to an epitope of the extracellular domain of the human CD38.

[0411] In several embodiments, the CD38 binding protein comprises an scFv comprising a light chain variable region (vL domain) and heavy chain variable region (vH domain). In several embodiments, the vH domain comprises a complementarity-determining region 1 (CDR-H1), a CDR-H2, and a CDR-H3. In several embodiments, the vL domain comprises a complementarity-determining region 1 (CDR-L1), a CDR-L2, and a CDR-L3. In several embodiments, the anti-CD38 vL domain comprises the sequence of SEQ ID NO: 424, or an amino acid sequence with at least about 80%, at least about 85%, at least about 90%, at least about 94%, at least about 95%, at least about 96%, at least about 97%, at least about 98%, or at least about 99%, sequence identity, homology and/or functional equivalence to SEQ ID NO: 424. In several embodiments, the anti-CD38 vL domain comprises the sequence of SEQ ID NO: 424. In some embodiments, the vL comprises a CDR-L1, a CDR-L2, and a CDR-L3 as comprised in the sequence set forth in SEQ ID NO:424. In several embodiments, the anti-CD38 vH domain comprises the sequence of SEQ ID NO: 425, or an amino acid sequence with at least about 80%, at least about 85%, at least about 90%, at least about 94%, at least about 95%, at least about 96%, at least about 97%, at least about 98%, or at least about 99%, sequence identity, homology and/or functional equivalence to SEQ ID NO: 425. In several embodiments, the anti-CD38 vH domain comprises the sequence of SEQ ID NO: 425. In some embodiments, the vH comprises a CDR-H1, a CDR-H2, and a CDR-H3 as comprised in the sequence set forth in SEQ ID NO:425. In several embodiments, the anti-CD38 binding protein is an scFv that comprises the sequence of SEQ ID NO: 433, or an amino acid sequence with at least about 80%, at least about 85%, at least about 90%, at least about 94%, at least about 95%, at least about 96%, at least about 97%, at least about 98%, or at least about 99%, sequence identity, homology and/or functional equivalence to SEQ ID NO: 433. In several embodiments, the anti-CD38 binding protein is an scFv that comprises the sequence of SEQ ID NO: 433. In several embodiments, the anti-CD38 CAR comprises the sequence of SEQ ID NO: 426, or an amino acid sequence with at least about 80%, at least about 85%, at least about 90%, at least about 94%, at least about 95%, at least about 96%, at least about 97%, at least about 98%, or at least about 99%, sequence identity, homology and/or functional equivalence to SEQ ID NO: 426. In several embodiments, the anti-CD38 CAR comprises the sequence of SEQ ID NO: 426. In several embodiments, the anti-CD38 binding protein comprises at least one CDR from SEQ ID NO: 427-432 or a CDR having at least about 95%, at least about 96%, at least about 97%, at least about 98%, or at least about 99%, sequence identity, homology and/or functional equivalence to any of SEQ ID NO: 427-432. In several embodiments, the antigen binding protein is affinity matured to enhance binding to CD38. In several embodiments, the nucleotide sequence encoding the antigen binding protein is codon-optimized to enhance expression and/or stability of the protein.

### GPRC5D

[0412] In several embodiments, an antigen binding protein is directed against GPRC5D. According to one embodiment, the GPRC5D antigen binding protein is an antigen binding domain of a CAR which comprises a transmembrane domain, a signaling domain, and optionally a co-stimulatory domain as disclosed herein. In several embodiments, the antigen binding protein binds to an epitope of the human GPRC5D. In several embodiments, the GPRC5D antigen binding domain comprises a vL and/or vH. In several embodiments, the GPRC5D antigen binding domain comprises a vL and a vH. In several embodiments, the vH comprises a complementarity-determining region 1 (CDR-H1), a CDR-H2, and a CDR-H3. In several embodiments, the vL comprises a complementarity-determining region 1 (CDR-L1), a CDR-L2, and a CDR-L3. In several embodiments, the GPRC5D antigen binding domain is an scFv comprising the amino acid sequence of any one of SEQ ID NOs: 522-531, or an amino acid sequence with at least about 80%, at least about 85%, at least about 90%, at least about 94%, at least about 95%, at least about 96%, at least about 97%, at least about 98%, or at least about 99%, sequence identity, homology and/or functional equivalence to any of SEQ ID NOs: 522-531. In several embodiments, the GPRC5D antigen binding domain is an scFv comprising the amino acid sequence of any one of SEQ ID NOs: 522-531. In several embodiments, the antigen binding protein is affinity matured to enhance binding to GPRC5D. In several embodiments, the nucleotide sequence encoding the antigen binding protein is codon-optimized to enhance expression and/or stability of the protein.

### CD138

[0413] In several embodiments, an antigen binding protein is directed against CD138. In several embodiments, the anti-CD138 binding protein comprises a vL and/or vH chain. In several embodiments, the anti-CD138 binding protein comprises a vL and a vH. In several embodiments, the vH domain comprises a complementarity-determining region 1 (CDR-H1), a CDR-H2. and a CDR-H3. In several embodiments, the vL domain comprises a complementarity-determining region 1 (CDR-L1), a CDR-L2, and a CDR-L3. In several embodiments, the vL chain comprises the amino acid sequence of SEQ ID NO: 434, or an amino acid sequence with at least about 80%, at least about 85%, at least about 90%, at least about 94%, at least about 95%, at least about 96%, at least about 97%, at least about 98%, or at least about 99%, sequence identity, homology and/or functional equivalence to SEQ ID NO: 434. In several embodiments, the vL chain comprises the amino acid sequence of SEQ ID NO: 434. In some embodiments, the VL comprises a CDR-L1, a CDR-L2, and a CDR-L3 as comprised in SEQ ID NO:434. In several embodiments, the vH chain comprises the amino acid sequence of SEQ ID NO: 435, or an amino acid sequence with at least about 80%, at least about 85%, at least about 90%, at least about 94%, at least about 95%, at least about 96%, at least about 97%, at least about 98%, or at least about 99%, sequence identity, homology and/or functional equivalence to SEQ ID NO: 435. In several embodiments, the vH chain comprises the amino acid sequence of SEQ ID NO: 435. In some embodiments, the VH comprises a CDR-H1, a CDR-H2, and a CDR-H3 as comprised in SEQ ID NO:435. In several embodiments, the anti-CD138 binding protein comprises at least one CDR from SEQ ID NO: 437-442 or a CDR having at least about 95%, at least about 96%, at least about 97%, at least about 98%, or at least about 99%, sequence identity, homology and/or functional equivalence to any of SEQ ID NO: 437-442. In several embodiments, the anti-CD138 binding protein is an scFv comprising the amino acid sequence of SEQ ID NO: 443, or an amino acid sequence with at least about 80%, at least about 85%, at least about 90%, at least about 94%, at least about 95%, at least about 96%, at least about 97%, at least about 98%, or at least about 99%, sequence identity, homology and/or functional equivalence to SEQ ID NO: 443. In several embodiments, the anti-CD138 binding protein is an scFv comprising the amino acid sequence of SEQ ID NO: 443. In several embodiments, the anti-CD138 binding protein is integrated into a CAR which comprises a transmembrane domain, a signaling domain, and optionally a co-stimulatory domain as disclosed herein comprising the amino acid sequence of SEQ ID NO: 436 or 444, or an amino acid sequence with at least about 80%, at least about 85%, at least about 90%, at least about 94%, at least about 95%, at least about 96%, at least about 97%, at least about 98%, or at least about 99%, sequence identity, homology and/or functional equivalence to SEQ ID NO: 436 or 444. In several embodiments, the CAR comprises the sequence of SEQ ID NO:436. In several embodiments, the CAR comprises the sequence of SEQ ID NO:444. In several embodiments, the antigen binding protein is affinity matured to enhance binding to CD138. In several embodiments, the nucleotide sequence encoding the antigen binding protein is codon-optimized to enhance expression and/or stability of the protein.

### DLL3

[0414] In several embodiments, an antigen binding protein is directed against DLL3. In several embodiments, the anti-DLL3 binding protein is an antigen binding domain of a CAR which comprises a transmembrane domain, a signaling domain, and optionally a co-stimulatory domain as disclosed herein. In several embodiments, the anti-DLL3 binding protein comprises a vL and a vH. In several embodiments, the vH domain comprises a complementarity-determining region 1 (CDR-H1), a CDR-H2, and a CDR-H3. In several embodiments, the vL domain comprises a complementarity-determining region 1 (CDR-L1), a CDR-L2, and a CDR-L3. In several embodiments, the anti-DLL3 antigen binding protein comprises a vH chain comprising the amino acid sequence of any of SEQ ID NOs: 471-482, or a sequence having at least about 95%, at least about 96%, at least about 97%, at least about 98%, or at least about 99%. sequence identity, homology and/or functional equivalence to any of SEQ ID NO: 471-482. In several embodiments, the anti-DLL3 antigen binding protein comprises a vH chain comprising the amino acid sequence of any of SEQ ID NOs: 471-482. In some embodiments, the VH comprises a CDR-H1, a CDR-H2, and a CDR-H3 as comprised in any one of SEQ ID NO:471-482. In several embodiments, the anti-DLL3 antigen binding protein comprises a vL chain comprising the amino acid sequence of any of SEQ ID NOs: 483-494, or a sequence having at least about 95%, at least about 96%, at least about 97%, at least about 98%, or at least about 99%, sequence identity, homology and/or functional equivalence to any of SEQ ID NO: 483-494. In several embodiments, the anti-DLL3 antigen binding protein comprises a vL chain comprising the amino acid sequence of any of SEQ ID NOs: 483-494. In some embodiments, the VL comprises a CDR-L1, a CDR-L2, and a CDR-L3 as comprised in any one of SEQ ID NO:483-494. In several embodiments, the anti-DLL3 binding protein comprises a polypeptide that targets DLL3 and comprises the amino acid sequence of any of SEQ ID NO: 495-496, or a sequence having at least about 95%, at least about 96%, at least about 97%, at least about 98%, or at least about 99%, sequence identity, homology and/or functional equivalence to any of SEQ ID NO: 495-496. In several embodiments, the anti-DLL3 binding protein comprises an scFv comprising the sequence of any of SEQ ID NO: 497-500, or a sequence having at least about 95%, at least about 96%, at least about 97%, at least about 98%, or at least about 99%, sequence identity, homology and/or functional equivalence to any of SEQ ID NO: 497-500. In several embodiments, the anti-DLL3 binding protein comprises an scFv comprising the sequence of any of SEQ ID NO: 497-500In several embodiments, the antigen binding protein is affinity matured to enhance binding to DLL3. In several embodiments, the nucleotide sequence encoding the antigen binding protein is codon-optimized to enhance expression and/or stability of the protein.

### EGFR

[0415] In several embodiments, an antigen binding protein is directed against the epidermal growth factor receptor EGFR. In several embodiments, the anti-EGFR binding protein is an antigen binding domain of a CAR which comprises a transmembrane domain, a signaling domain, and optionally a co-stimulatory domain as disclosed herein. In several embodiments, the anti-EGFR binding protein comprises a vH chain comprising the amino acid sequence of any of SEQ ID NO: 507-508, or a sequence having at least about 95%, at least about 96%, at least about 97%, at least about 98%, or at least about 99%, sequence identity, homology and/or functional equivalence to any of SEQ ID NO: 507-508. In several embodiments, the anti-EGFR binding protein comprises a vH chain comprising the amino acid sequence of any of SEQ ID NO: 507-508. In some embodiments, the VH comprises a CDR-H1, a CDR-H2, and a CDR-H3 as comprised in SEQ ID NO:507 or 508. In several embodiments, the anti-EGFR binding protein comprises a vL chain comprising the amino acid sequence of any of SEQ ID NO: 509-510, or a sequence having at least about 95%, at least about 96%, at least about 97%, at least about 98%, or at least about 99%, sequence identity, homology and/or functional equivalence to any of SEQ ID NO: 509-510. In several embodiments, the anti-EGFR binding protein comprises a vL chain comprising the amino acid sequence of any of SEQ ID NO: 509-510. In some embodiments, the VL comprises a CDR-L1, a CDR-L2, and a CDR-L3 as comprised in SEQ ID NO:509 or 510. In several embodiments, the anti-EGFR binding protein is an scFv comprising the amino acid sequence of any of SEQ ID NOs: 511-521, or a sequence having at least about 95%, at least about 96%, at least about 97%, at least about 98%, or at least about 99%, sequence identity, homology and/or functional equivalence to any of SEQ ID NO: 511-521. In several embodiments, the anti-EGFR binding protein is an scFv comprising the amino acid sequence of any of SEQ ID NOs: 511-521. In several embodiments, the anti-EGFR binding protein is incorporated into a CAR having the sequence of any of SEQ ID NOs: 503-506, or a sequence having at least about 95%, at least about 96%, at least about 97%, at least about 98%, or at least about 99%, sequence identity, homology and/or functional equivalence to any of SEQ ID NO: 503-506. In some embodiments, the CAR comprises the sequence of any one of SEQ ID NOS:503-506. In several embodiments, the antigen binding protein is affinity matured to enhance binding to the EGFR. In several embodiments, the nucleotide sequence encoding the antigen binding protein is codon-optimized to enhance expression and/or stability of the protein.

### PSMA

[0416] In several embodiments, an antigen binding protein is directed against PSMA. In several embodiments, the anti-PSMA binding protein is an antigen binding domain of a CAR which comprises a transmembrane domain, a signaling domain, and optionally a co-stimulatory domain as disclosed herein. In several embodiments, the anti-PSMA binding protein comprises a vL chain comprising the amino acid sequence of SEQ ID NO: 534, or a sequence having at least about 95%, at least about 96%, at least about 97%, at least about 98%, or at least about 99%, sequence identity, homology and/or functional equivalence to SEQ ID NO: 534. In several embodiments, the anti-PSMA binding protein comprises a vL chain comprising the amino acid sequence of SEQ ID NO: 534. In some embodiments, the VL comprises a CDR-L1, a CDR-L2, and a CDR-L3 as comprised in SEQ ID NO:534. In several embodiments, the anti-PSMA binding protein comprises a vH chain comprising the amino acid sequence of SEQ ID NO: 535, or a sequence having at least about 95%, at least about 96%, at least about 97%, at least about 98%, or at least about 99%, sequence identity, homology and/or functional equivalence to SEQ ID NO: 535. In several embodiments, the anti-PSMA binding protein comprises a vH chain comprising the amino acid sequence of SEQ ID NO: 535. In some embodiments, the VH comprises a CDR-H1, a CDR-H2, and a CDR-H3 as comprised in SEQ ID NO:535. In several embodiments, the anti-PSMA binding protein comprises an scFv comprising the amino acid sequence of SEQ ID NO: 533, or a sequence having at least about 95%, at least about 96%, at least about 97%, at least about 98%, or at least about 99%, sequence identity, homology and/or functional equivalence to SEQ ID NO: 533. In several embodiments, the anti-PSMA binding protein comprises an scFv comprising the amino acid sequence of SEQ ID NO: 533. In several embodiments, the anti-PSMA binding protein comprises an antibody comprising the amino acid sequence of SEQ ID NO: 532, or a sequence having at least about 95%, at least about 96%, at least about 97%, at least about 98%, or at least about 99%, sequence identity, homology and/or functional equivalence to SEQ ID NO: 532. In several embodiments, the anti-PSMA binding protein comprises an antibody comprising the amino acid sequence of SEQ ID NO: 532. In several embodiments, the antigen binding protein is affinity matured to enhance binding to PSMA. In several embodiments, the nucleotide sequence encoding the antigen binding protein is codon-optimized to enhance expression and/or stability of the protein.

### FLT3

[0417] In several embodiments, an antigen binding protein is directed against FLT3. In several embodiments, the anti-FLT3 binding protein is an antigen binding domain of a CAR which comprises a transmembrane domain, a signaling domain, and optionally a co-stimulatory domain as disclosed herein. In several embodiments, the anti-FLT3 binding protein comprises one or more CDRs from the vL and/or vH chain selected from SEQ ID NOs: 537-545, or a CDR having at least about 95%, at least about 96%, at least about 97%, at least about 98%, or at least about 99%, sequence identity, homology and/or functional equivalence to any of SEQ ID NO: 537-545. In several embodiments, the anti-FLT3 binding protein comprises a vL chain comprising the amino acid sequence of SEQ ID NO: 546, or a sequence having at least about 95%, at least about 96%, at least about 97%, at least about 98%, or at least about 99%, sequence identity, homology and/or functional equivalence to SEQ ID NO: 546. In several embodiments, the anti-FLT3 binding protein comprises a vL chain comprising the amino acid sequence of SEQ ID NO: 546. In some embodiments, the VL comprises a CDR-L1, a CDR-L2, and a CDR-L3 as comprised in SEQ ID NO:546. In several embodiments, the anti-FLT3 binding protein comprises a vH chain comprising the amino acid sequence of SEQ ID NO: 547, or a sequence having at least about 95%, at least about 96%, at least about 97%, at least about 98%, or at least about 99%, sequence identity, homology and/or functional equivalence to SEQ ID NO: 547. In several embodiments, the anti-FLT3 binding protein comprises a vH chain comprising the amino acid sequence of SEQ ID NO: 547. In some embodiments, the VH comprises a CDR-H1, a CDR-1H2, and a CDR-H3 as comprised in SEQ ID NO:547. In several embodiments, the antigen binding protein is affinity matured to enhance binding to FLT3. In several embodiments, the nucleotide sequence encoding the antigen binding protein is codon-optimized to enhance expression and/or stability of the protein.

### KREMEN2

[0418] In several embodiments, an antigen binding protein is directed against KREMEN2. In several embodiments, the anti-KREMEN2 binding protein is an antigen binding domain of a CAR which comprises a transmembrane domain, a signaling domain, and optionally a co-stimulatory domain as disclosed herein. In several embodiments, the anti-KREMEN2 binding protein comprises a vL chain comprising the amino acid sequence of any of SEQ ID NOs: 548-552, or a sequence having at least about 95%, at least about 96%, at least about 97%, at least about 98%, or at least about 99%, sequence identity, homology and/or functional equivalence to any of SEQ ID NOs: 548-552. In several embodiments, the anti-KREMEN2 binding protein comprises a vL chain comprising the amino acid sequence of any of SEQ ID NOs: 548-552. In some embodiments, the VL comprises a CDR-L1, a CDR-L2, and a CDR-L3 as comprised in any one of SEQ ID NO:548-552. In several embodiments, the anti-KREMEN2 binding protein comprises a vH chain comprising the amino acid sequence of any of SEQ ID NOs: 553-556, or a sequence having at least about 95%, at least about 96%, at least about 97%, at least about 98%, or at least about 99%, sequence identity, homology and/or functional equivalence to any of SEQ ID NOs: 553-556. In several embodiments, the anti-KREMEN2 binding protein comprises a vH chain comprising the amino acid sequence of any of SEQ ID NOs: 553-556. In some embodiments, the VH comprises a CDR-H1, a CDR-H2, and a CDR-H3 as comprised in any one of SEQ ID NO:553-556. In several embodiments, the anti-KREMEN2 binding protein is an antibody comprising the amino acid sequence of SEQ ID NO: 557, or a sequence having at least about 95%, at least about 96%, at least about 97%, at least about 98%, or at least about 99%. sequence identity, homology and/or functional equivalence to SEQ ID NO: 557. In several embodiments, the anti-KREMEN2 binding protein is an antibody comprising the amino acid sequence of SEQ ID NO: 557. In several embodiments, the antigen binding protein is affinity matured to enhance binding to KREMEN2. In several embodiments, the nucleotide sequence encoding the antigen binding protein is codon-optimized to enhance expression and/or stability of the protein.

### CD70

[0419] In several embodiments, an antigen binding protein is directed against CD70 (also known as CD27 ligand, CD27L, or Tumor necrosis factor ligand superfamily member 7).

[0420] According to one embodiment, the CD70 antigen binding protein is an antigen binding domain of a CAR which comprises a transmembrane domain, a signaling domain, and optionally a co-stimulatory domain as disclosed herein. In several embodiments, the antigen binding protein binds to an epitope of the human CD70, and in particular to an epitope of the extracellular domain of the human CD70.

[0421] In several embodiments, the CD70 binding protein comprises an scFv comprising a light chain variable region (vL domain) and heavy chain variable region (vH domain). In several embodiments, the vH domain comprises a complementarity-determining region 1 (CDR-H1), a CDR-H2, and a CDR-H3. In several embodiments, the vL domain comprises a complementarity-determining region 1 (CDR-L1), a CDR-L2, and a CDR-L3. In several embodiments, the CDR-L1, CDR-L2, and CDR-L3 comprise the amino acid sequences set forth in SEQ ID NOS: 990, 991, and 992, respectively. In several embodiments, the anti-CD70 vL domain comprises the sequence of SEQ ID NO: 994, or an amino acid sequence with at least about 80%, at least about 85%, at least about 90%, at least about 94%, at least about 95%, at least about 96%, at least about 97%, at least about 98%, or at least about 99%, sequence identity, homology and/or functional equivalence to SEQ ID NO: 994. In several embodiments, the anti-CD70 vL domain comprises the sequence of SEQ ID NO: 994. In some embodiments, the vL comprises a CDR-L1, a CDR-L2, and a CDR-L3 as comprised in the sequence set forth in SEQ ID NO:994. In some embodiments, the CDR-H1, CDR-H2, and CDR-H3 comprise the amino acid sequences set forth in SEQ ID NOS: 987, 988, and 989, respectively. In several embodiments, the anti-CD70 vH domain comprises the sequence of SEQ ID NO: 993, or an amino acid sequence with at least about 80%, at least about 85%, at least about 90%, at least about 94%, at least about 95%, at least about 96%, at least about 97%, at least about 98%, or at least about 99%, sequence identity, homology and/or functional equivalence to SEQ ID NO: 993. In several embodiments, the anti-CD70 vH domain comprises the sequence of SEQ ID NO: 993. In some embodiments, the vH comprises a CDR-H1, a CDR-H2, and a CDR-H3 as comprised in the sequence set forth in SEQ ID NO:993. In some embodiments, the vL comprises a CDR-L1, a CDR-L2, and a CDR-L3 as comprised in the sequence set forth in SEQ ID NO:994, and the vH comprises a CDR-H1, a CDR-H2, and a CDR-H3 as comprised in the sequence set forth in SEQ ID NO:993. In several embodiments, the vL comprises the sequence of SEQ ID NO: 994, and the vH comprises the sequence of SEQ ID NO: 993. In several embodiments, the antigen binding protein is affinity matured to enhance binding to CD70. In several embodiments, the nucleotide sequence encoding the antigen binding protein is codon-optimized to enhance expression and/or stability of the protein. Additional anti-CD70 binding moieties are known in the art, such as those disclosed in, for example, PCT Application No. PCT/US2021/036879, the entirety of which is incorporated by reference herein.

### BCMA

[0422] In several embodiments, an antigen binding protein is directed against BCMA (also known as B cell maturation antigen, Tumor necrosis factor receptor superfamily member 17, TNFRSF17, and CD269). Thus, in some embodiments, the antigen-binding protein is a BCMA-binding protein.

[0423] According to one embodiment, the BCMA antigen binding protein is an antigen binding domain of a CAR which comprises a transmembrane domain, a signaling domain, and optionally a co-stimulatory domain as disclosed herein. In several embodiments, the antigen binding protein binds to an epitope of the human BCMA, and in particular to an epitope of the extracellular domain of the human BCMA.

[0424] In several embodiments, the antigen-binding protein comprises a heavy chain variable region (VH domain). In some embodiments, antigen-binding protein comprises a single domain antibody (e.g., a V_{H}H). In some embodiments, the antigen-binding protein comprises a VHH.

[0425] In several embodiments, the antigen-binding protein comprises a heavy chain variable region (vH domain) and a light chain variable region (vL domain). In some embodiments, the antigen-binding protein comprises a linker between the vH and vL domains. In several embodiments, the antigen-binding protein comprises an scFv. In several embodiments, the BCMA binding protein comprises an scFv comprising a light chain variable region (vL domain) and heavy chain variable region (vH domain).

[0426] In several embodiments, the vH domain comprises a complementarity-determining region 1 (CDR-H1), a CDR-H2, and a CDR-1H3. In several embodiments, the vL domain comprises a complementarity-determining region 1 (CDR-L1), a CDR-L2, and a CDR-L3.

[0427] In several embodiments, the vH domain comprises the CDR-H1, CDR-H2, and CDR-H3 set forth in SEQ ID NOS: 1016, 1017, and 1018, respectively. In several embodiments, the vL domain comprises the CDR-L1, CDR-L2, and CDR-L3 set forth in SEQ ID NOS: 1019, 1020, and 1021, respectively. In several embodiments, the vH domain comprises the CDR-H1, CDR-H2, and CDR-H3 set forth in SEQ ID NOS: 1016, 1017, and 1018, respectively; and the vL domain comprises the CDR-L1, CDR-L2, and CDR-L3 set forth in SEQ ID NOS: 1019, 1020, and 1021, respectively. In several embodiments, the vH domain comprises the amino acid sequence set forth in SEQ ID NO:1022. In several embodiments, the vL domain comprises the amino acid sequence set forth in SEQ ID NO:1023. In several embodiments, the vH domain comprises the amino acid sequence set forth in SEQ ID NO:1022, and the vL domain comprises the amino acid sequence set forth in SEQ ID NO:1023. In several embodiments, the scFv comprises the amino acid sequence set forth in SEQ ID NO:1024. In several embodiments, the scFv comprises the amino acid sequence set forth in SEQ ID NO:1025.

[0428] In several embodiments, the vH domain comprises the CDR-H1, CDR-H2, and CDR-H3 set forth in SEQ ID NOS: 1026, 1027, and 1028, respectively. In several embodiments, the vL domain comprises the CDR-L1, CDR-L2, and CDR-L3 set forth in SEQ ID NOS: 1029, 1030, and 1031, respectively. In several embodiments, the vH domain comprises the CDR-H1, CDR-H2, and CDR-H3 set forth in SEQ ID NOS: 1026, 1027, and 1028, respectively; and the vL domain comprises the CDR-L1, CDR-L2, and CDR-L3 set forth in SEQ ID NOS: 1029, 1030, and 1031, respectively. In several embodiments, the vH domain comprises the amino acid sequence set forth in SEQ ID NO:1032. In several embodiments, the vL domain comprises the amino acid sequence set forth in SEQ ID NO:1033. In several embodiments, the vH domain comprises the amino acid sequence set forth in SEQ ID NO:1032, and the vL domain comprises the amino acid sequence set forth in SEQ ID NO:1033. In several embodiments, the scFv comprises the amino acid sequence set forth in SEQ ID NO:1034. In several embodiments, the scFv comprises the amino acid sequence set forth in SEQ ID NO:1035.

[0429] In several embodiments, the vH domain comprises the CDR-H1, CDR-H2, and CDR-H3 set forth in SEQ ID NOS: 1026, 1027, and 1028, respectively. In several embodiments, the vL domain comprises the CDR-L1, CDR-L2, and CDR-L3 set forth in SEQ ID NOS: 1029, 1036, and 1031, respectively. In several embodiments, the vH domain comprises the CDR-H1, CDR-H2, and CDR-H3 set forth in SEQ ID NOS: 1026, 1027, and 1028, respectively; and the vL domain comprises the CDR-L1, CDR-L2, and CDR-L3 set forth in SEQ ID NOS: 1029, 1036, and 1031, respectively. In several embodiments, the vH domain comprises the amino acid sequence set forth in SEQ ID NO:1032. In several embodiments, the vL domain comprises the amino acid sequence set forth in SEQ ID NO:1037. In several embodiments, the vH domain comprises the amino acid sequence set forth in SEQ ID NO:1032, and the vL domain comprises the amino acid sequence set forth in SEQ ID NO:1037. In several embodiments, the scFv comprises the amino acid sequence set forth in SEQ ID NO:1034. In several embodiments, the scFv comprises the amino acid sequence set forth in SEQ ID NO:1038. In several embodiments, the scFv comprises the amino acid sequence set forth in SEQ ID NO:1039.

[0430] In several embodiments, the vH domain comprises the CDR-H1, CDR-H2, and CDR-H3 set forth in SEQ ID NOS: 1040, 1041, and 1042, respectively. In several embodiments, the vL domain comprises the CDR-L1, CDR-L2, and CDR-L3 set forth in SEQ ID NOS: 1043, 1044, and 1045, respectively. In several embodiments, the vH domain comprises the CDR-H1, CDR-H2, and CDR-H3 set forth in SEQ ID NOS: 1040, 1041, and 1042, respectively; and the vL domain comprises the CDR-L1, CDR-L2, and CDR-L3 set forth in SEQ ID NOS: 1043, 1044, and 1045, respectively. In several embodiments, the vH domain comprises the amino acid sequence set forth in SEQ ID NO:1046. In several embodiments, the vL domain comprises the amino acid sequence set forth in SEQ ID NO:1047. In several embodiments, the vH domain comprises the amino acid sequence set forth in SEQ ID NO:1046, and the vL domain comprises the amino acid sequence set forth in SEQ ID NO:1047. In several embodiments, the scFv comprises the amino acid sequence set forth in SEQ ID NO:1048. In several embodiments, the scFv comprises the amino acid sequence set forth in SEQ ID NO:1049.

[0431] In several embodiments, the vH domain comprises the CDR-H1, CDR-H2, and CDR-H3 set forth in SEQ ID NOS: 1050, 1051, and 1052, respectively. In several embodiments, the vL domain comprises the CDR-L1, CDR-L2, and CDR-L3 set forth in SEQ ID NOS: 1053, 1054, and 1055, respectively. In several embodiments, the vH domain comprises the CDR-H1, CDR-H2, and CDR-H3 set forth in SEQ ID NOS: 1050, 1051, and 1052, respectively; and the vL domain comprises the CDR-L1, CDR-L2, and CDR-L3 set forth in SEQ ID NOS: 1053, 1054, and 1055, respectively. In several embodiments, the vH domain comprises the amino acid sequence set forth in SEQ ID NO:1056. In several embodiments, the vL domain comprises the amino acid sequence set forth in SEQ ID NO:1057. In several embodiments, the vH domain comprises the amino acid sequence set forth in SEQ ID NO:1056, and the vL domain comprises the amino acid sequence set forth in SEQ ID NO:1057. In several embodiments, the scFv comprises the amino acid sequence set forth in SEQ ID NO:1058.

[0432] In several embodiments, the vH domain comprises the CDR-H1, CDR-H2, and CDR-H3 set forth in SEQ ID NOS: 1050, 1059, and 1052, respectively. In several embodiments, the vL domain comprises the CDR-L1, CDR-L2, and CDR-L3 set forth in SEQ ID NOS: 1053, 1054, and 1055, respectively. In several embodiments, the vH domain comprises the CDR-H1, CDR-H2, and CDR-H3 set forth in SEQ ID NOS: 1050, 1059, and 1052, respectively; and the vL domain comprises the CDR-L1, CDR-L2, and CDR-L3 set forth in SEQ ID NOS: 1053, 1054, and 1055, respectively. In several embodiments, the vH domain comprises the amino acid sequence set forth in SEQ ID NO:1060. In several embodiments, the vL domain comprises the amino acid sequence set forth in SEQ ID NO:1057. In several embodiments, the vH domain comprises the amino acid sequence set forth in SEQ ID NO:1060, and the vL domain comprises the amino acid sequence set forth in SEQ ID NO:1057. In several embodiments, the scFv comprises the amino acid sequence set forth in SEQ ID NO:1061.

[0433] In several embodiments, the vH domain comprises the CDR-H1, CDR-H2, and CDR-H3 set forth in SEQ ID NOS: 1062, 1063, and 1064, respectively. In several embodiments, the vL domain comprises the CDR-L1, CDR-L2, and CDR-L3 set forth in SEQ ID NOS: 1065, 1066, and 1067, respectively. In several embodiments, the vH domain comprises the CDR-H1, CDR-H2, and CDR-H3 set forth in SEQ ID NOS: 1062, 1063, and 1064, respectively; and the vL domain comprises the CDR-L1, CDR-L2, and CDR-L3 set forth in SEQ ID NOS: 1065, 1066, and 1067, respectively. In several embodiments, the vH domain comprises the amino acid sequence set forth in SEQ ID NO:1068. In several embodiments, the vL domain comprises the amino acid sequence set forth in SEQ ID NO:1059. In several embodiments, the vH domain comprises the amino acid sequence set forth in SEQ ID NO:1068, and the vL domain comprises the amino acid sequence set forth in SEQ ID NO:1069. In several embodiments, the scFv comprises the amino acid sequence set forth in SEQ ID NO:1070.

[0434] In several embodiments, the vH domain comprises the CDR-H1, CDR-H2, and CDR-H3 set forth in SEQ ID NOS: 1071, 1072, and 1073, respectively. In several embodiments, the vL domain comprises the CDR-L1, CDR-L2, and CDR-L3 set forth in SEQ ID NOS: 1074, 1020, and 1075, respectively. In several embodiments, the vH domain comprises the CDR-H1, CDR-H2, and CDR-H3 set forth in SEQ ID NOS: 1071, 1072, and 1073, respectively; and the vL domain comprises the CDR-L1, CDR-L2, and CDR-L3 set forth in SEQ ID NOS: 1074, 1020, and 1075, respectively. In several embodiments, the vH domain comprises the amino acid sequence set forth in SEQ ID NO:1076. In several embodiments, the vL domain comprises the amino acid sequence set forth in SEQ ID NO:1077. In several embodiments, the vH domain comprises the amino acid sequence set forth in SEQ ID NO:1076, and the vL domain comprises the amino acid sequence set forth in SEQ ID NO:1077. In several embodiments, the scFv comprises the amino acid sequence set forth in SEQ ID NO:1078.

[0435] In several embodiments, the vH domain comprises the CDR-H1, CDR-H2, and CDR-H3 set forth in SEQ ID NOS: 1079, 1080, and 1081, respectively. In several embodiments, the vL domain comprises the CDR-L1, CDR-L2, and CDR-L3 set forth in SEQ ID NOS: 1082, 1044, and 1083, respectively. In several embodiments, the vH domain comprises the CDR-H1, CDR-H2, and CDR-H3 set forth in SEQ ID NOS: 1079, 1080, and 1081, respectively; and the vL domain comprises the CDR-L1, CDR-L2, and CDR-L3 set forth in SEQ ID NOS: 1082, 1044, and 1083, respectively. In several embodiments, the vH domain comprises the amino acid sequence set forth in SEQ ID NO:1084. In several embodiments, the vL domain comprises the amino acid sequence set forth in SEQ ID NO:1085. In several embodiments, the vH domain comprises the amino acid sequence set forth in SEQ ID NO:1084, and the vL domain comprises the amino acid sequence set forth in SEQ ID NO:1085. In several embodiments, the scFv comprises the amino acid sequence set forth in SEQ ID NO:1086.

[0436] In several embodiments, the antigen binding protein is affinity matured to enhance binding to BCMA. In several embodiments, the nucleotide sequence encoding the antigen binding protein is codon-optimized to enhance expression and/or stability of the protein. Anti-BCMA binding moieties are known in the art, such as those disclosed in, for example, PCT Application No. PCT/US2022/073567, the entirety of which is incorporated by reference herein.

### CD19

[0437] In some embodiments, the antigen-binding protein binds to CD19. In some embodiments, an antigen-binding protein is provided comprising a heavy chain variable domain having at least 90% identity to the VH domain amino acid sequence set forth in SEQ ID NO: 33. In some embodiments, the antigen-binding protein comprises a heavy chain variable domain having at least 95% identity to the VH domain amino acid sequence set forth in SEQ ID NO: 33. In some embodiments, the antigen-binding protein comprises a heavy chain variable domain having at least 96, 97, 98, or 99% identity to the VH domain amino acid sequence set forth in SEQ ID NO: 33. In several embodiments, the heavy chain variable domain may have one or more additional mutations (e.g., for purposes of humanization) in the VH domain amino acid sequence set forth in SEQ ID NO: 33, but retains specific binding to a cancer antigen (e.g., CD19). In several embodiments, the heavy chain variable domain may have one or more additional mutations in the VH domain amino acid sequence set forth in SEQ ID NO: 33, but has improved specific binding to a cancer antigen (e.g., CD19). In some embodiments, the VH comprises the amino acid sequence set forth in SEQ ID NO:33. In some embodiments, the VH comprises a CDR-H1, a CDR-H2, and a CDR-H3 as comprised in SEQ ID NO:33. In some embodiments, the VH comprises a CDR-H1, a CDR-H2, and a CDR-H3 comprising the amino acid sequences set forth in SEQ ID NOS: 981, 982, and 983, respectively.

[0438] In some embodiments, the antigen-binding protein comprises a light chain variable domain having at least 90% identity to the VL domain amino acid sequence set forth in SEQ ID NO: 32. In some embodiments, the antigen-binding protein comprises a light chain variable domain having at least 95% identity to the VL domain amino acid sequence set forth in SEQ ID NO: 32. In some embodiments, the antigen-binding protein comprises a light chain variable domain having at least 96, 97, 98, or 99% identity to the VL domain amino acid sequence set forth in SEQ ID NO: 32. In several embodiments, the light chain variable domain may have one or more additional mutations (e.g., for purposes of humanization) in the VL domain amino acid sequence set forth in SEQ ID NO: 32, but retains specific binding to a cancer antigen (e.g., CD19). In several embodiments, the light chain variable domain may have one or more additional mutations in the VL domain amino acid sequence set forth in SEQ ID NO: 32, but has improved specific binding to a cancer antigen (e.g., CD19). In some embodiments, the VL comprises the amino acid sequence set forth in SEQ ID NO:32. In some embodiments, the VL comprises a CDR-L1, a CDR-L2, and a CDR-L3 as comprised in SEQ ID NO:32. In some embodiments, the VL comprises a CDR-L1, a CDR-L2, and a CDR-L3 comprising the amino acid sequences set forth in SEQ ID NOS: 984, 985, and 39, respectively.

[0439] In some embodiments, the antigen-binding protein comprises a heavy chain variable domain having at least 90% identity to the VH domain amino acid sequence set forth in SEQ ID NO: 33, and a light chain variable domain having at least 90% identity to the VL domain amino acid sequence set forth in SEQ ID NO: 32. In some embodiments, the antigen-binding protein comprises a heavy chain variable domain having at least 95% identity to the VH domain amino acid sequence set forth in SEQ ID NO: 33, and a light chain variable domain having at least 95% identity to the VL domain amino acid sequence set forth in SEQ ID NO: 32. In some embodiments, the antigen-binding protein comprises a heavy chain variable domain having at least 96, 97, 98, or 99% identity to the VH domain amino acid sequence set forth in SEQ ID NO: 33, and a light chain variable domain having at least 96, 97, 98, or 99% identity to the VL domain amino acid sequence set forth in SEQ ID NO: 32.

[0440] In some embodiments, the antigen-binding protein comprises a heavy chain variable domain having the VH domain amino acid sequence set forth in SEQ ID NO: 33, and a light chain variable domain having the VL domain amino acid sequence set forth in SEQ ID NO: 32. In some embodiments, the light-chain variable domain comprises a sequence of amino acids that is at least 70%, 75%, 80%, 85%, 90%, 91%, 92%, 93%, 94%, 95%, 96%, 97%, 98%, 99%, or more, identical to the sequence of a light chain variable domain of SEQ ID NO: 32. In some embodiments, the light-chain variable domain comprises a sequence of amino acids that is at least 70%, 75%, 80%, 85%, 90%, 91%, 92%, 93%, 94%, 95%, 96%, 97%, 98%, 99%, or more, identical to the sequence of a heavy chain variable domain in accordance with SEQ ID NO: 33.

[0441] In some embodiments, the light chain variable domain comprises a sequence of amino acids that is encoded by a nucleotide sequence that is at least 70%, 75%, 80%, 85%, 90%, 91%, 92%, 93%, 94%, 95%, 96%, 97%, 98%, 99%, or more, identical to the polynucleotide sequence SEQ ID NO: 32. In some embodiments, the light chain variable domain comprises a sequence of amino acids that is encoded by a polynucleotide that hybridizes under moderately stringent conditions to the complement of a polynucleotide that encodes a light chain variable domain in accordance with the sequence in SEQ ID NO: 32. In some embodiments, the light chain variable domain comprises a sequence of amino acids that is encoded by a polynucleotide that hybridizes under stringent conditions to the complement of a polynucleotide that encodes a light chain variable domain in accordance with the sequence in SEQ ID NO: 32.

[0442] In some embodiments, the heavy chain variable domain comprises a sequence of amino acids that is at least 70%, 75%, 80%, 85%, 90%, 91%, 92%, 93%, 94%, 95%, 96%, 97%, 98%, 99%, or more, identical to the sequence of a heavy chain variable domain in accordance with the sequence of SEQ ID NO: 33. In some embodiments, the heavy chain variable domain comprises a sequence of amino acids that is encoded by a polynucleotide that hybridizes under moderately stringent conditions to the complement of a polynucleotide that encodes a heavy chain variable domain in accordance with the sequence of SEQ ID NO: 33. In some embodiments, the heavy chain variable domain comprises a sequence of amino acids that is encoded by a polynucleotide that hybridizes under stringent conditions to the complement of a polynucleotide that encodes a heavy chain variable domain in accordance with the sequence of SEQ ID NO: 33.

[0443] In some embodiments, the anti-CD19 binding protein is an scFv comprising a VH and a VL. In several embodiments, additional anti-CD19 binding constructs are provided. For example, in several embodiments, there is provided an scFv that targets CD19 wherein the scFv comprises a heavy chain variable region comprising the sequence of SEQ ID NO. 35. In some embodiments, the antigen-binding protein comprises a heavy chain variable domain having at least 95% identity to the HCV domain amino acid sequence set forth in SEQ ID NO: 35. In some embodiments, the antigen-binding protein comprises a heavy chain variable domain having at least 96, 97, 98, or 99% identity to the HCV domain amino acid sequence set forth in SEQ ID NO: 35. In several embodiments, the heavy chain variable domain may have one or more additional mutations (e.g., for purposes of humanization) in the HCV domain amino acid sequence set forth in SEQ ID NO: 35, but retains specific binding to a cancer antigen (e.g., CD19). In several embodiments, the heavy chain variable domain may have one or more additional mutations in the HCV domain amino acid sequence set forth in SEQ ID NO: 35, but has improved specific binding to a cancer antigen (e.g., CD19). In some embodiments, the scFv comprises a VH comprising the amino acid sequence of SEQ ID NO:35 and a VL comprising the amino acid sequence of SEQ ID NO:36.

[0444] Additionally, in several embodiments, an scFv that targets CD19 comprises a light chain variable region comprising the sequence of SEQ ID NO. 36. In some embodiments, the antigen-binding protein comprises a light chain variable domain having at least 95% identity to the LCV domain amino acid sequence set forth in SEQ ID NO: 36. In some embodiments, the antigen-binding protein comprises a light chain variable domain having at least 96, 97, 98, or 99% identity to the LCV domain amino acid sequence set forth in SEQ ID NO: 36. In several embodiments, the light chain variable domain may have one or more additional mutations (e.g., for purposes of humanization) in the LCV domain amino acid sequence set forth in SEQ ID NO: 36, but retains specific binding to a cancer antigen (e.g., CD19). In several embodiments, the light chain variable domain may have one or more additional mutations in the LCV domain amino acid sequence set forth in SEQ ID NO: 36, but has improved specific binding to a cancer antigen (e.g., CD19). In some embodiments, the CD19-directed CAR comprises the amino acid sequence set forth in SEQ ID NO:986.

[0445] In several embodiments, there is also provided an anti-CD19 binding moiety that comprises a light chain CDR comprising a first, second and third complementarity determining region (LC CDR1, LC CDR2, and LC CDR3, respectively. In several embodiments, the anti-CD19 binding moiety further comprises a heavy chain CDR comprising a first, second and third complementarity determining region (HC CDR1, HC CDR2, and HC CDR3, respectively. In several embodiments, the LC CDR1 comprises the sequence of SEQ ID NO. 37. In several embodiments, the LC CDR1 comprises an amino acid sequence with at least about 85%, about 90%, about 95%, or about 98% sequence identity to the sequence of SEQ NO. 37. In several embodiments, the LC CDR2 comprises the sequence of SEQ ID NO. 38. In several embodiments, the LC CDR2 comprises an amino acid sequence with at least about 85%, about 90%, about 95%, or about 98% sequence identity to the sequence of SEQ NO. 38. In several embodiments, the LC CDR3 comprises the sequence of SEQ ID NO. 39. In several embodiments, the LC CDR3 comprises an amino acid sequence with at least about 85%, about 90%, about 95%, or about 98% sequence identity to the sequence of SEQ NO. 39. In several embodiments, the HC CDR1 comprises the sequence of SEQ ID NO. 40. In several embodiments, the HC CDR1 comprises an amino acid sequence with at least about 85%, about 90%, about 95%, or about 98% sequence identity to the sequence of SEQ NO. 40. In several embodiments, the HC CDR2 comprises the sequence of SEQ ID NO. 41, 42, or 43. In several embodiments, the HC CDR2 comprises an amino acid sequence with at least about 85%, about 90%, about 95%, or about 98% sequence identity to the sequence of SEQ NO. 41, 42, or 43. In several embodiments, the HC CDR3 comprises the sequence of SEQ ID NO. 44. In several embodiments, the HC CDR3 comprises an amino acid sequence with at least about 85%, about 90%, about 95%, or about 98% sequence identity to the sequence of SEQ NO. 44.

[0446] In several embodiments, there is also provided an anti-CD19 binding moiety that comprises a light chain variable region (VL) and a heavy chain variable region (HL), the VL region comprising a first, second and third complementarity determining region (VL CDR1, VL CDR2, and VL CDR3, respectively and the VH region comprising a first, second and third complementarity determining region (VH CDR1, VH CDR2, and VH CDR3, respectively. In several embodiments, the VL region comprises the sequence of SEQ ID NO. 45, 46, 47, or 48. In several embodiments, the VL region comprises an amino acid sequence with at least about 85%, about 90%, about 95%, or about 98% sequence identity to the sequence of SEQ NO. 45, 46, 47, or 48. In several embodiments, the VH region comprises the sequence of SEQ ID NO. 49, 50, 51 or 52. In several embodiments, the VH region comprises an amino acid sequence with at least about 85%, about 90%, about 95%, or about 98% sequence identity to the sequence of SEQ NO. 49, 50, 51 or 52.

[0447] In several embodiments, there is also provided an anti-CD19 binding moiety that comprises a light chain CDR comprising a first, second and third complementarity determining region (LC CDR1, LC CDR2, and LC CDR3, respectively. In several embodiments, the anti-CD19 binding moiety further comprises a heavy chain CDR comprising a first, second and third complementarity determining region (HC CDR1, HC CDR2, and HC CDR3, respectively. In several embodiments, the LC CDR1 comprises the sequence of SEQ ID NO. 53. In several embodiments, the LC CDR1 comprises an amino acid sequence with at least about 85%, about 90%, about 95%, or about 98% sequence identity to the sequence of SEQ NO. 53. In several embodiments, the LC CDR2 comprises the sequence of SEQ ID NO. 54. In several embodiments, the LC CDR2 comprises an amino acid sequence with at least about 85%, about 90%, about 95%, or about 98% sequence identity to the sequence of SEQ NO. 54. In several embodiments, the LC CDR3 comprises the sequence of SEQ ID NO. 55. In several embodiments, the LC CDR3 comprises an amino acid sequence with at least about 85%, about 90%, about 95%, or about 98% sequence identity to the sequence of SEQ NO. 55. In several embodiments, the HC CDR1 comprises the sequence of SEQ ID NO. 56. In several embodiments, the HC CDR1 comprises an amino acid sequence with at least about 85%, about 90%, about 95%, or about 98% sequence identity to the sequence of SEQ NO. 56. In several embodiments, the HC CDR2 comprises the sequence of SEQ ID NO. 57. In several embodiments, the HC CDR2 comprises an amino acid sequence with at least about 85%, about 90%, about 95%, or about 98% sequence identity to the sequence of SEQ NO. 57. In several embodiments, the HC CDR3 comprises the sequence of SEQ ID NO. 58. In several embodiments, the HC CDR3 comprises an amino acid sequence with at least about 85%, about 90%, about 95%, or about 98% sequence identity to the sequence of SEQ NO. 58.

[0448] In some embodiments, the antigen-binding protein comprises a heavy chain variable region comprising the amino acid sequence of SEQ ID NO: 104. In some embodiments, the antigen-binding protein comprises a heavy chain variable region having at least 90% identity to the VH domain amino acid sequence set forth in SEQ ID NO: 104. In some embodiments, the antigen-binding protein comprises a heavy chain variable domain having at least 95% sequence identity to the VH domain amino acid sequence set forth in SEQ ID NO: 104. In some embodiments, the antigen-binding protein comprises a heavy chain variable domain having at least 96, 97, 98, or 99% sequence identity to the VH domain amino acid sequence set forth in SEQ ID NO: 104. In several embodiments, the heavy chain variable domain may have one or more additional mutations (e.g., for purposes of humanization) in the VH domain amino acid sequence set forth in SEQ ID NO: 104, but retains specific binding to a cancer antigen (e.g., CD19). In several embodiments, the heavy chain variable domain may have one or more additional mutations in the VH domain amino acid sequence set forth in SEQ ID NO: 104, but has improved specific binding to a cancer antigen (e.g., CD19).

[0449] In some embodiments, the antigen-binding protein comprises a light chain variable region comprising the amino acid sequence of SEQ ID NO: 105. In some embodiments, the antigen-binding protein comprises a light chain variable region having at least 90% sequence identity to the VL domain amino acid sequence set forth in SEQ ID NO: 105. In some embodiments, the antigen-binding protein comprises a light chain variable domain having at least 95% sequence identity to the VL domain amino acid sequence set forth in SEQ ID NO: 105. In some embodiments, the antigen-binding protein comprises a light chain variable domain having at least 96, 97, 98, or 99% sequence identity to the VL domain amino acid sequence set forth in SEQ ID NO: 105. In several embodiments, the light chain variable domain may have one or more additional mutations (e.g., for purposes of humanization) in the VL domain amino acid sequence set forth in SEQ ID NO: 105, but retains specific binding to a cancer antigen (e.g., CD19). In several embodiments, the light chain variable domain may have one or more additional mutations in the VL domain amino acid sequence set forth in SEQ ID NO: 105, but has improved specific binding to a cancer antigen (e.g., CD19).

[0450] In some embodiments, the antigen-binding protein comprises a heavy chain variable domain having the VH domain amino acid sequence set forth in SEQ ID NO: 104, and a light chain variable domain having the VL domain amino acid sequence set forth in SEQ ID NO: 105. In some embodiments, the light-chain variable domain comprises a sequence of amino acids that is at least 70%, 75%, 80%, 85%, 90%, 91%, 92%, 93%, 94%, 95%, 96%, 97%, 98%, 99%, or more, identical to the sequence of a light chain variable domain of SEQ ID NO: 105. In some embodiments, the heavy-chain variable domain comprises a sequence of amino acids that is at least 70%, 75%, 80%, 85%, 90%, 91%, 92%, 93%, 94%, 95%, 96%, 97%, 98%, 99%, or more, identical to the sequence of a heavy chain variable domain in accordance with SEQ ID NO: 104.

[0451] In some embodiments, the antigen-binding protein comprises a heavy chain variable comprising the amino acid sequence of SEQ ID NO: 106. In some embodiments, the antigen-binding protein comprises a heavy chain variable having at least 90% sequence identity to the VH amino acid sequence set forth in SEQ ID NO: 106. In some embodiments, the antigen-binding protein comprises a heavy chain variable having at least 95% sequence identity to the VH amino acid sequence set forth in SEQ ID NO: 106. In some embodiments, the antigen-binding protein comprises a heavy chain variable having at least 96, 97, 98, or 99% identity to the VH amino acid sequence set forth in SEQ ID NO: 106. In several embodiments, the heavy chain variable may have one or more additional mutations (e.g., for purposes of humanization) in the VH amino acid sequence set forth in SEQ ID NO: 106, but retains specific binding to a cancer antigen (e.g., CD19). In several embodiments, the heavy chain variable may have one or more additional mutations in the VH amino acid sequence set forth in SEQ ID NO: 106, but has improved specific binding to a cancer antigen (e.g., CD19).

[0452] In some embodiments, the antigen-binding protein comprises a light chain variable comprising the amino acid sequence of SEQ ID NO: 107. In some embodiments, the antigen-binding protein comprises a light chain variable region having at least 90% sequence identity to the VL amino acid sequence set forth in SEQ ID NO: 107. In some embodiments, the antigen-binding protein comprises a light chain variable having at least 95% sequence identity to the VL amino acid sequence set forth in SEQ ID NO: 107. In some embodiments, the antigen-binding protein comprises a light chain variable having at least 96, 97, 98, or 99% identity to the VL amino acid sequence set forth in SEQ ID NO: 107. In several embodiments, the light chain variable may have one or more additional mutations (e.g., for purposes of humanization) in the VL amino acid sequence set forth in SEQ ID NO: 107, but retains specific binding to a cancer antigen (e.g., CD19). In several embodiments, the light chain variable may have one or more additional mutations in the VL amino acid sequence set forth in SEQ ID NO: 107, but has improved specific binding to a cancer antigen (e.g., CD19).

[0453] In several embodiments, there is also provided an anti-CD19 binding moiety that comprises a light chain CDR comprising a first, second and third complementarity determining region (LC CDR1, LC CDR2, and LC CDR3, respectively. In several embodiments, the anti-CD19 binding moiety further comprises a heavy chain CDR comprising a first, second and third complementarity determining region (HC CDR1, HC CDR2, and HC CDR3, respectively. In several embodiments, the LC CDR1 comprises the sequence of SEQ ID NO. 108. In several embodiments, the LC CDR1 comprises an amino acid sequence with at least about 85%, about 90%, about 95%, or about 98% sequence identity to the sequence of SEQ NO. 108. In several embodiments, the LC CDR2 comprises the sequence of SEQ ID NO. 109. In several embodiments, the LC CDR2 comprises an amino acid sequence with at least about 85%, about 90%, about 95%, or about 98% sequence identity to the sequence of SEQ NO. 109. In several embodiments, the LC CDR3 comprises the sequence of SEQ ID NO. 110. In several embodiments, the LC CDR3 comprises an amino acid sequence with at least about 85%, about 90%, about 95%, or about 98% sequence identity to the sequence of SEQ NO. 110. In several embodiments, the HC CDR1 comprises the sequence of SEQ ID NO. 111. In several embodiments, the HC CDR1 comprises an amino acid sequence with at least about 85%, about 90%, about 95%, or about 98% sequence identity to the sequence of SEQ NO. 111. In several embodiments, the HC CDR2 comprises the sequence of SEQ ID NO. 112, 113, or 114. In several embodiments, the HC CDR2 comprises an amino acid sequence with at least about 85%, about 90%, about 95%, or about 98% sequence identity to the sequence of SEQ NO. 112, 113, or 114. In several embodiments, the HC CDR3 comprises the sequence of SEQ ID NO. 115. In several embodiments, the HC CDR3 comprises an amino acid sequence with at least about 85%, about 90%, about 95%, or about 98% sequence identity to the sequence of SEQ NO. 115. In several embodiments, the anti-CD19 binding moiety comprises SEQ ID NO: 116, or is sequence with at least about 85%, about 90%, about 95%, or about 98% sequence identity to the sequence of SEQ NO. 116.

[0454] In some embodiments, the antigen-binding protein comprises a light chain variable comprising the amino acid sequence of SEQ ID NO: 117, 118, or 119. In some embodiments, the antigen-binding protein comprises a light chain variable region having at least 90% identity to the VL amino acid sequence set forth in SEQ ID NO: 117, 118, or 119. In some embodiments, the antigen-binding protein comprises a light chain variable having at least 95% identity to the VL amino acid sequence set forth in SEQ ID NO: 117, 118, or 119. In some embodiments, the antigen-binding protein comprises a light chain variable having at least 96, 97, 98, or 99% identity to the VL amino acid sequence set forth in SEQ ID NO: 117, 118, or 119. In several embodiments, the light chain variable may have one or more additional mutations (e.g., for purposes of humanization) in the VL amino acid sequence set forth in SEQ ID NO: 117, 118, or 119, but retains specific binding to a cancer antigen (e.g., CD19). In several embodiments, the light chain variable may have one or more additional mutations in the VL amino acid sequence set forth in SEQ ID NO: 117, 118, or 119, but has improved specific binding to a cancer antigen (e.g., CD19).

[0455] In some embodiments, the antigen-binding protein comprises a heavy chain variable comprising the amino acid sequence of SEQ ID NO: 120,121, 122, or 123. In some embodiments, the antigen-binding protein comprises a heavy chain variable having at least 90% identity to the VH amino acid sequence set forth in SEQ ID NO: 120,121, 122, or 123. In some embodiments, the antigen-binding protein comprises a heavy chain variable having at least 95% identity to the VH amino acid sequence set forth in SEQ ID NO: 120,121, 122, or 123. In some embodiments, the antigen-binding protein comprises a heavy chain variable having at least 96, 97, 98, or 99% identity to the VH amino acid sequence set forth in SEQ ID NO: 120,121, 122, or 123. In several embodiments, the heavy chain variable may have one or more additional mutations (e.g., for purposes of humanization) in the VH amino acid sequence set forth in SEQ ID NO: 120,121, 122, or 123, but retains specific binding to a cancer antigen (e.g., CD19). In several embodiments, the heavy chain variable may have one or more additional mutations in the VH amino acid sequence set forth in SEQ ID NO: 120,121, 122, or 123, but has improved specific binding to a cancer antigen (e.g., CD19).

[0456] In several embodiments, there is also provided an anti-CD19 binding moiety that comprises a light chain CDR comprising a first, second and third complementarity determining region (LC CDR1, LC CDR2, and LC CDR3, respectively. In several embodiments, the anti-CD19 binding moiety further comprises a heavy chain CDR comprising a first, second and third complementarity determining region (HC CDR1, HC CDR2, and HC CDR3, respectively. In several embodiments, the LC CDR1 comprises the sequence of SEQ ID NO. 124, 127, or 130. In several embodiments, the LC CDR1 comprises an amino acid sequence with at least about 85%, about 90%, about 95%, or about 98% sequence identity to the sequence of SEQ NO. 124, 127, or 130. In several embodiments, the LC CDR2 comprises the sequence of SEQ ID NO. 125, 128, or 131. In several embodiments, the LC CDR2 comprises an amino acid sequence with at least about 85%, about 90%, about 95%, or about 98% sequence identity to the sequence of SEQ NO. 125, 128, or 131. In several embodiments, the LC CDR3 comprises the sequence of SEQ ID NO. 126, 129, or 132. In several embodiments, the LC CDR3 comprises an amino acid sequence with at least about 85%, about 90%, about 95%, or about 98% sequence identity to the sequence of SEQ NO. 126, 129, or 132. In several embodiments, the HC CDR1 comprises the sequence of SEQ ID NO. 133, 136, 139, or 142. In several embodiments, the HC CDR1 comprises an amino acid sequence with at least about 85%, about 90%, about 95%, or about 98% sequence identity to the sequence of SEQ NO. 133, 136, 139, or 142. In several embodiments, the HC CDR2 comprises the sequence of SEQ ID NO. 134, 137, 140, or 143. In several embodiments, the HC CDR2 comprises an amino acid sequence with at least about 85%, about 90%, about 95%, or about 98% sequence identity to the sequence of SEQ NO. 134, 137, 140, or 143. In several embodiments, the HC CDR3 comprises the sequence of SEQ ID NO. 135, 138, 141, or 144. In several embodiments, the HC CDR3 comprises an amino acid sequence with at least about 85%, about 90%, about 95%, or about 98% sequence identity to the sequence of SEQ NO. 135, 138, 141, or 144.

[0457] Additional anti-CD19 binding moieties are known in the art, such as those disclosed in, for example, U.S. Pat. No. 8,399,645, US Patent Publication No. 2018/0153977, US Patent Publication No. 2014/0271635, US Patent Publication No. 2018/0251514, US Patent Publication No. 2018/0312588, and PCT Publication No. WO 2020/180882, the entirety of each of which is incorporated by reference herein.

### CLDN6

[0458] Several embodiments relate to CARs that are directed to Claudin 6, and show little or no binding to Claudin 3, 4, or 9 (or other Claudins). In some embodiments, the antigen-binding protein binds to Claudin 6 (CLDN6). In some embodiments, the antigen-binding protein comprises a heavy chain variable (VH) comprising the amino acid sequence of SEQ ID NO: 88. In some embodiments, the VH comprises a CDR-H1, a CDR-H2, and a CDR-H3 as comprised in SEQ ID NO:88. In some embodiments, the antigen-binding protein comprises a heavy chain variable having at least 90% identity to the VH amino acid sequence set forth in SEQ ID NO: 88. In some embodiments, the antigen-binding protein comprises a heavy chain variable having at least 95% identity to the VH amino acid sequence set forth in SEQ ID NO: 88. In some embodiments, the antigen-binding protein comprises a heavy chain variable having at least 96, 97, 98, or 99% identity to the VH amino acid sequence set forth in SEQ ID NO: 88. In several embodiments, the heavy chain variable may have one or more additional mutations (e.g., for purposes of humanization) in the VH amino acid sequence set forth in SEQ ID NO: 88, but retains specific binding to a cancer antigen (e.g., CLDN6). In several embodiments, the heavy chain variable may have one or more additional mutations in the VH amino acid sequence set forth in SEQ ID NO: 88, but has improved specific binding to a cancer antigen (e.g., CLDN6).

[0459] In some embodiments, the antigen-binding protein comprises a light chain variable (VL) comprising the amino acid sequence of SEQ ID NO: 89, 90 or 91. In some embodiments, the VL comprises a CDR-L1, a CDR-L2, and a CDR-L3 as comprised in any one of SEQ ID NO: 89-91. In some embodiments, the antigen-binding protein comprises a light chain variable region having at least 90% identity to the VL amino acid sequence set forth in SEQ ID NO: 89, 90 or 91. In some embodiments, the antigen-binding protein comprises a light chain variable having at least 95% identity to the VL amino acid sequence set forth in SEQ ID NO: 89, 90 or 91. In some embodiments, the antigen-binding protein comprises a light chain variable having at least 96, 97, 98, or 99% identity to the VL amino acid sequence set forth in SEQ ID NO: 89, 90 or 91. In several embodiments, the light chain variable may have one or more additional mutations (e.g., for purposes of humanization) in the VL amino acid sequence set forth in SEQ ID NO: 89, 90 or 91, but retains specific binding to a cancer antigen (e.g., CLDN6). In several embodiments, the light chain variable may have one or more additional mutations in the VL amino acid sequence set forth in SEQ ID NO: 89, 90 or 91, but has improved specific binding to a cancer antigen (e.g., CLDN6).

[0460] In several embodiments, there is also provided an anti-CLDN6 binding moiety that comprises a light chain CDR comprising a first, second and third complementarity determining region (LC CDR1, LC CDR2, and LC CDR3, respectively. In several embodiments, the anti-CD19 binding moiety further comprises a heavy chain CDR comprising a first, second and third complementarity determining region (HC CDR1, HC CDR2, and HC CDR3, respectively. In several embodiments, the LC CDR1 comprises the sequence of SEQ ID NO. 95, 98, or 101. In several embodiments, the LC CDR1 comprises an amino acid sequence with at least about 85%, about 90%, about 95%, or about 98% sequence identity to the sequence of SEQ NO. 95, 98, or 101. In several embodiments, the LC CDR2 comprises the sequence of SEQ ID NO. 96, 99, or 102. In several embodiments, the LC CDR2 comprises an amino acid sequence with at least about 85%, about 90%, about 95%, or about 98% sequence identity to the sequence of SEQ NO. 96, 99, or 102. In several embodiments, the LC CDR3 comprises the sequence of SEQ ID NO. 97, 100, or 103. In several embodiments, the LC CDR3 comprises an amino acid sequence with at least about 85%, about 90%, about 95%, or about 98% sequence identity to the sequence of SEQ NO. 97, 100, or 103. In several embodiments, the HC CDR1 comprises the sequence of SEQ ID NO. 92. In several embodiments, the HC CDR1 comprises an amino acid sequence with at least about 85%, about 90%, about 95%, or about 98% sequence identity to the sequence of SEQ NO. 92. In several embodiments, the HC CDR2 comprises the sequence of SEQ ID NO. 93. In several embodiments, the HC CDR2 comprises an amino acid sequence with at least about 85%, about 90%, about 95%, or about 98% sequence identity to the sequence of SEQ NO. 93. In several embodiments, the HC CDR3 comprises the sequence of SEQ ID NO. 94. In several embodiments, the HC CDR3 comprises an amino acid sequence with at least about 85%, about 90%, about 95%, or about 98% sequence identity to the sequence of SEQ NO. 94. In several embodiments, the antigen-binding protein does not bind claudins other than CLDN6

Natural Killer Group Domains that Bind Tumor Ligands

[0461] In several embodiments, engineered immune cells such as NK cells are leveraged for their ability to recognize and destroy tumor cells. For example, an engineered NK cell may include a CD19-directed chimeric antigen receptor or a nucleic acid encoding said chimeric antigen receptor (or a CAR directed against, for example, one or more of CD123, CD70, Her2, mesothelin, Claudin 6, BCMA, EGFR, etc.). NK cells express both inhibitory and activating receptors on the cell surface. Inhibitory receptors bind self-molecules expressed on the surface of healthy cells (thus preventing immune responses against “self” cells), while the activating receptors bind ligands expressed on abnormal cells, such as tumor cells. When the balance between inhibitory and activating receptor activation is in favor of activating receptors, NK cell activation occurs and target (e.g., tumor) cells are lysed.

[0462] Natural killer Group 2 member D (NKG2D) is an NK cell activating receptor that recognizes a variety of ligands expressed on cells. The surface expression of various NKG2D ligands is generally low in healthy cells but is upregulated upon, for example, malignant transformation. Non-limiting examples of ligands recognized by NKG2D include, but are not limited to, MICA, MICB, ULBP1. ULBP2, ULBP3, ULBP4, ULBP5, and ULBP6, as well as other molecules expressed on target cells that control the cytolytic or cytotoxic function of NK cells. In several embodiments, T cells are engineered to express an extracellular domain to binds to one or more tumor ligands and activate the T cell. For example, in several embodiments, T cells are engineered to express an NKG2D receptor as the binder/activation moiety. In several embodiments, engineered cells as disclosed herein are engineered to express another member of the NKG2 family, e.g., NKG2A, NKG2C, and/or NKG2E. Combinations of such receptors are engineered in some embodiments. Moreover, in several embodiments, other receptors are expressed, such as the Killer-cell immunoglobulin-like receptors (KIRs).

[0463] In several embodiments, cells are engineered to express a cytotoxic receptor complex comprising a full length NKG2D as an extracellular component to recognize ligands on the surface of tumor cells (e.g., liver cells). In one embodiment, full length NKG2D has the nucleic acid sequence of SEQ ID NO: 27. In several embodiments, the full length NKG2D, or functional fragment thereof is human NKG2D. Additional information about chimeric receptors for use in the presently disclosed methods and compositions can be found in PCT Patent Publication No. WO/2018/183385, which is incorporated in its entirety by reference herein.

[0464] In several embodiments, cells are engineered to express a cytotoxic receptor complex comprising a functional fragment of NKG2D as an extracellular component to recognize ligands on the surface of tumor cells or other diseased cells. In one embodiment, the functional fragment of NKG2D has the nucleic acid sequence of SEQ ID NO: 25. In several embodiments, the fragment of NKG2D is at least 70%, at least 75%, at least 80%, at least 85%, at least 90%, or at least 95% homologous with full-length wild-type NKG2D. In several embodiments, the fragment may have one or more additional mutations from SEQ ID NO: 25, but retains, or in some embodiments, has enhanced, ligand-binding function. In several embodiments, the functional fragment of NKG2D comprises the amino acid sequence of SEQ ID NO: 26. In several embodiments, the NKG2D fragment is provided as a dimer, trimer, or other concatameric format, such embodiments providing enhanced ligand-binding activity. In several embodiments, the sequence encoding the NKG2D fragment is optionally fully or partially codon optimized. In one embodiment, a sequence encoding a codon optimized NKG2D fragment comprises the sequence of SEQ ID NO: 28. Advantageously, according to several embodiments, the functional fragment lacks its native transmembrane or intracellular domains but retains its ability to bind ligands of NKG2D as well as transduce activation signals upon ligand binding. A further advantage of such fragments is that expression of DAP10 to localize NKG2D to the cell membrane is not required. Thus, in several embodiments, the cytotoxic receptor complex encoded by the polypeptides disclosed herein does not comprise DAP10. In several embodiments, a NKG2D-targeting CAR comprises the amino acid sequence set forth in SEQ ID NO: 980. In several embodiments, immune cells, such as NK or T cells (e.g., non-alloreactive T cells engineered according to embodiments disclosed herein), are engineered to express one or more chimeric receptors that target, for example CD19, CD123, CD70, Her2, mesothelin, Claudin 6, BCMA, EGFR, and an NKG2D ligand, such as MICA, MICB, ULBP1, ULBP2, ULBP3, ULBP4, ULBP5, and/or ULBP6. Such cells, in several embodiments, also co-express mbIL15.

[0465] In several embodiments, the cytotoxic receptor complexes are configured to dimerize. Dimerization may comprise homodimers or heterodimers, depending on the embodiment. In several embodiments, dimerization results in improved ligand recognition by the cytotoxic receptor complexes (and hence the NK cells expressing the receptor), resulting in a reduction in (or lack) of adverse toxic effects. In several embodiments, the cytotoxic receptor complexes employ internal dimers, or repeats of one or more component subunits. For example, in several embodiments, the cytotoxic receptor complexes may optionally comprise a first NKG2D extracellular domain coupled to a second NKG2D extracellular domain, and a transmembrane/signaling region (or a separate transmembrane region along with a separate signaling region).

[0466] In several embodiments, the various domains/subdomains are separated by a linker such as, a GS3 linker (SEQ ID NO: 15 and 16, nucleotide and protein, respectively) is used (or a GSn linker). In some embodiments, such as wherein the antigen-binding domain comprises a VH and a VL, the VH and VL are connected by a linker. In some embodiments, such as wherein the antigen-binding domain comprises a VH and a VL, the antigen-binding domain comprises a linker between the VH and VL. In some embodiments, such as wherein the antigen-binding domain comprises multiple (e.g., two) VHHs, the VHHs are connected by a linker. In some embodiments, such as wherein the antigen-binding domain comprises multiple (e.g., two) VHHs, the antigen-binding domain comprises a linker between the VHHs. In several embodiments, the linker comprises SEQ ID NO: 15. In several embodiments, the linker comprises SEQ ID NO: 16. In several embodiments, the linker comprises SEQ ID NO: 1014. In several embodiments, the linker comprises SEQ ID NO: 1015. Other linkers used according to various embodiments disclosed herein include, but are not limited to those encoded by SEQ ID NO: 17, 19, 21 or 23. This provides the potential to separate the various component parts of the receptor complex along the polynucleotide, which can enhance expression, stability, and/or functionality of the receptor complex.

### Cytotoxic Signaling Complex

[0467] Some embodiments of the compositions and methods described herein relate to a chimeric receptor, such as a chimeric antigen receptor (e.g., a CAR directed to CD19, CD70, BCMA, Her2, mesothelin, Claudin 6, CD123,or EGFR (among others), or a chimeric receptor directed against an NKG2D ligand, such as MICA, MICB, ULBP1, ULBP2, ULBP3, ULBP4, ULBP5, and/or ULBP6) that includes a cytotoxic signaling complex. As disclosed herein, according to several embodiments, the provided cytotoxic receptor complexes comprise one or more transmembrane and/or intracellular domains that initiate cytotoxic signaling cascades upon the extracellular domain(s) binding to ligands on the surface of target cells.

[0468] Thus, in some embodiments, the chimeric receptor comprises an extracellular binding domain (e.g., an antigen-binding domain), a transmembrane domain, and an intracellular signaling domain. In several embodiments, the cytotoxic signaling complex comprises at least one transmembrane domain, at least one co-stimulatory domain, and/or at least one signaling domain. In some embodiments, more than one component part makes up a given domain—e.g., a co-stimulatory domain may comprise two subdomains. In some embodiments, the intracellular signaling domain comprises a primary signaling domain (e.g., CD3zeta). In some embodiments, the intracellular signaling domain comprises a co-stimulatory signaling domain (e.g., OX40, CD28, DAP10, 4-1 BB, or ICOS). In some embodiments, the intracellular signaling domain comprises a primary signaling domain (e.g., CD3zeta) and a co-stimulatory signaling domain (e.g., OX40, CD28, DAP10, 4-1BB, or ICOS). Moreover, in some embodiments, a domain may serve multiple functions, for example, a transmembrane domain may also serve to provide signaling function.

### Transmembrane Domains

[0469] Some embodiments of the compositions and methods described herein relate to chimeric receptors (e.g., tumor antigen-directed CARs and/or ligand-directed chimeric receptors) that comprise a transmembrane domain. Some embodiments include a transmembrane domain from NKG2D or another transmembrane protein. In several embodiments in which a transmembrane domain is employed, the portion of the transmembrane protein employed retains at least a portion of its normal transmembrane domain.

[0470] The antigen-binding protein generally is linked to one or more intracellular signaling components, such as signaling components that mimic activation through an antigen receptor complex, such as a TCR complex, in the case of a CAR, and/or signal via another cell surface receptor. Thus, in some embodiments, the antigen-binding component (e.g., antibody) is linked to one or more transmembrane and intracellular signaling domains. In some embodiments, the transmembrane domain is fused to the extracellular domain. In one embodiment, a transmembrane domain that naturally is associated with one of the domains in the receptor, e.g., CAR, is used. In some instances, the transmembrane domain is selected or modified by amino acid substitution to avoid binding of such domains to the transmembrane domains of the same or different surface membrane proteins to minimize interactions with other members of the receptor complex. In some embodiments, the transmembrane domain comprises a hinge. In some embodiments, the transmembrane domain comprises a transmembrane region. In some embodiments, the transmembrane domain comprises a hinge and/or a transmembrane region. In some embodiments, the transmembrane domain comprises a hinge and a transmembrane region.

[0471] The transmembrane domain in some embodiments is derived either from a natural or from a synthetic source. Where the source is natural, the domain in some aspects is derived from any membrane-bound or transmembrane protein. Transmembrane regions include those derived from (i.e. comprise at least the transmembrane region(s) of) the alpha, beta or zeta chain of the T-cell receptor, CD28, CD3 epsilon, CD45, CD4, CD5, CDS, CD9, CD 16, CD22, CD33, CD37, CD64, CD80, CD86, CD 134, CD137, CD 154 and/or transmembrane regions containing functional variants thereof such as those retaining a substantial portion of the structural, e.g., transmembrane, properties thereof. In some embodiments, the transmembrane domain is a transmembrane domain derived from CD4, CD28, or CD8, e.g., CD8alpha, or functional variant thereof. Alternatively the transmembrane domain in some embodiments is synthetic.

[0472] In several embodiments, however, the transmembrane domain comprises at least a portion of CD8, a transmembrane glycoprotein normally expressed on both T cells and NK cells. In several embodiments, the transmembrane domain comprises CD8a. In several embodiments, the transmembrane domain comprises a CD8 (e.g., CD8 a) hinge. In several embodiments, the transmembrane domain comprises a CD8 (e.g., CD8 a) transmembrane region. In several embodiments, the transmembrane domain comprises a CD8 (e.g., CD8 a) hinge and a CD8 (e.g., CD8 a) transmembrane region. In several embodiments, the transmembrane domain comprises a “hinge”, e.g. a CD8a hinge. In several embodiments, the “hinge” of CD8a has the nucleic acid sequence of SEQ ID NO: 1. In several embodiments, the CD8a hinge is truncated or modified and is at least 70%, at least 75%, at least 80%, at least 85%, at least 90%, at least 95% homologous with the CD8a having the sequence of SEQ ID NO: 1. In several embodiments, the “hinge” of CD8a comprises the amino acid sequence of SEQ ID NO: 2. In several embodiments, the CD8a can be truncated or modified, such that it is at least 70%, at least 75%, at least 80%, at least 85%, at least 90%, at least 95% homologous with the sequence of SEQ ID NO: 2.

[0473] In several embodiments, the transmembrane domain comprises a CD8a transmembrane region. In several embodiments, the CD8a transmembrane region is encoded by a nucleic acid sequence of SEQ ID NO: 3. In several embodiments, the CD8a transmembrane region is truncated or modified and is encoded by a nucleic acid sequence that has at least 70%, at least 75%, at least 80%, at least 85%, at least 90%, at least 95% sequence identity with the CD8a having the sequence of SEQ ID NO: 3. In several embodiments, the CD8a transmembrane region comprises the amino acid sequence of SEQ ID NO: 4. In several embodiments, the CD8a transmembrane region is truncated or modified and is at least 70%, at least 75%, at least 80%, at least 85%, at least 90%, at least 95% homologous with the CD8a having the sequence of SEQ ID NO: 4.

[0474] Taken together in several embodiments, the CD8 transmembrane domain is encoded by the nucleic acid sequence of SEQ ID NO: 13. In several embodiments, the CD8 transmembrane domain is truncated or modified and is at least 70%, at least 75%, at least 80%, at least 85%, at least 90%, at least 95% homologous with the CD8 transmembrane domain having the sequence of SEQ ID NO: 13. In several embodiments, the CD8 transmembrane domain comprises the amino acid sequence of SEQ ID NO: 14. In several embodiments, the CD8 transmembrane domain hinge is truncated or modified and is at least 70%, at least 75%, at least 80%, at least 85%, at least 90%, at least 95% homologous with the CD8 transmembrane domain having the sequence of SEQ ID NO: 14.

[0475] In some embodiments, the transmembrane domain comprises a CD28 transmembrane domain or a fragment thereof. In several embodiments, the CD28 transmembrane domain comprises the amino acid sequence of SEQ ID NO: 30. In several embodiments, the CD28 transmembrane domain is truncated or modified and is at least 70%, at least 75%, at least 80%, at least 85%, at least 90%, at least 95% homologous with the CD28 transmembrane domain having the sequence of SEQ ID NO: 30.

### Signaling Domains

[0476] Some embodiments of the compositions and methods described herein relate to a chimeric receptor (e.g., tumor antigen-directed CARs and/or tumor ligand-directed chimeric receptors) that includes a signaling domain. Among the intracellular signaling domains are those that mimic or approximate a signal through a natural antigen receptor, a signal through such a receptor in combination with a costimulatory receptor, and/or a signal through a costimulatory receptor alone.

[0477] The receptor, e.g., the CAR, generally includes at least one intracellular signaling component or components. In some embodiments, the receptor includes an intracellular component of a TCR complex, such as a TCR CD3 chain that mediates T-cell activation and cytotoxicity, e.g., CD3 zeta chain. Thus, in some aspects, the antigen-binding portion is linked to one or more cell signaling modules. In some embodiments, upon ligation of the CAR or other chimeric receptor, the cytoplasmic domain or intracellular signaling domain of the receptor activates at least one of the normal effector functions or responses of the immune cell, e.g., T cell engineered to express the CAR. For example, in some contexts, the CAR induces a function of a T cell such as cytolytic activity or T-helper activity, such as secretion of cytokines or other factors. In some embodiments, a truncated portion of an intracellular signaling domain of an antigen receptor component or costimulatory molecule is used in place of an intact immunostimulatory chain, for example, if it transduces the effector function signal. In some embodiments, the intracellular signaling domain or domains include the cytoplasmic sequences of the T cell receptor (TCR), and in some aspects also those of co-receptors that in the natural context act in concert with such receptors to initiate signal transduction following antigen receptor engagement.

[0478] In the context of a natural TCR, full activation generally requires not only signaling through the TCR, but also a costimulatory signal. Thus, in some embodiments, to promote full activation, a component for generating secondary or co-stimulatory signal is also included in the receptor.

[0479] T cell activation is in some aspects described as being mediated by two classes of cytoplasmic signaling sequences: those that initiate antigen-dependent primary activation through the TCR (primary cytoplasmic signaling sequences), and those that act in an antigen-independent manner to provide a secondary or co-stimulatory signal (secondary cytoplasmic signaling sequences). In some aspects, the receptor includes one or both of such signaling components.

[0480] In some aspects, the receptor includes a primary cytoplasmic signaling sequence that regulates primary activation of the TCR complex. Primary cytoplasmic signaling sequences that act in a stimulatory manner may contain signaling motifs which are known as immunoreceptor tyrosine-based activation motifs or ITAMs. Examples of ITAM containing primary cytoplasmic signaling sequences include those derived from TCR zeta, FcR gamma, FcR beta, CD3 gamma, CD3 delta, CD3 epsilon, CDS, CD22, CD79a, CD79b, and CD66d. In some embodiments, cytoplasmic signaling molecule(s) in the CAR contain(s) a cytoplasmic signaling domain, portion thereof, or sequence derived from CD3 zeta.

[0481] For example, immune cells engineered according to several embodiments disclosed herein may comprise at least one subunit of the CD3 T cell receptor complex (or a fragment thereof). In several embodiments, the signaling domain comprises the CD3 zeta subunit. In several embodiments, the CD3 zeta is encoded by the nucleic acid sequence of SEQ ID NO: 7. In several embodiments, the CD3 zeta can be truncated or modified, such that it is at least 70%, at least 75%, at least 80%, at least 85%, at least 90%, at least 95% homologous with the CD3 zeta having the sequence of SEQ ID NO: 7. In several embodiments, the CD3 zeta domain comprises the amino acid sequence of SEQ ID NO: 8. In several embodiments, the CD3 zeta domain is truncated or modified and is at least 70%, at least 75%, at least 80%, at least 85%, at least 90%, at least 95% homologous with the CD3 zeta domain having the sequence of SEQ ID NO: 8.

[0482] In some embodiments, the receptor includes a signaling domain and/or transmembrane portion of a costimulatory receptor, such as CD28, 4-1BB, OX40, DAP10, and ICOS. In some embodiments, the intracellular signaling domain comprises a co-stimulatory domain. In some aspects, the same receptor includes both the activating and costimulatory components. In some embodiments, the intracellular signaling component of the recombinant receptor, such as CAR, comprises a CD3 zeta intracellular domain and a costimulatory signaling region.

[0483] In some embodiments, the intracellular signaling region comprises an OX40 co-stimulatory domain. In some embodiments, the intracellular signaling region comprises an OX40 co-stimulatory domain and CD3zeta. In some embodiments, the intracellular signaling domain comprises a chimeric OX40 co-stimulatory domain linked to a CD3 zeta intracellular domain.

[0484] In several embodiments, unexpectedly enhanced signaling is achieved through the use of multiple signaling domains whose activities act synergistically. For example, in several embodiments, the signaling domain further comprises an OX40 domain. In several embodiments, the OX40 domain is an intracellular signaling domain. In several embodiments, the OX40 intracellular signaling domain has the nucleic acid sequence of SEQ ID NO: 5. In several embodiments, the OX40 intracellular signaling domain can be truncated or modified, such that it is at least 70%, at least 75%, at least 80%, at least 85%, at least 90%, at least 95% homologous with the OX40 having the sequence of SEQ ID NO: 5. In several embodiments, the OX40 intracellular signaling domain comprises the amino acid sequence of SEQ ID NO: 6. In several embodiments, the OX40 intracellular signaling domain is truncated or modified and is at least 70%, at least 75%, at least 80%, at least 85%, at least 90%, at least 95% homologous with the OX40 intracellular signaling domain having the sequence of SEQ ID NO: 6. In several embodiments, OX40 is used as the sole transmembrane/signaling domain in the construct, however, in several embodiments, OX40 can be used with one or more other domains. For example, combinations of OX40 and CD3zeta are used in some embodiments. By way of further example, combinations of CD28, OX40, 4-1BB, and/or CD3zeta are used in some embodiments.

[0485] In some embodiments, the intracellular signaling region comprises a 4-1BB co-stimulatory domain. In some embodiments, the intracellular signaling region comprises a 4-1BB co-stimulatory domain and CD3zeta. In several embodiments, the signaling domain comprises a 4-1BB domain. In several embodiments, the 4-1BB domain is an intracellular signaling domain. In several embodiments, the 4-1BB intracellular signaling domain comprises the amino acid sequence of SEQ ID NO: 29. In several embodiments, the 4-1BB intracellular signaling domain is truncated or modified and is at least 70%, at least 75%, at least 80%, at least 85%, at least 90%, at least 95% homologous with the 4-1BB intracellular signaling domain having the sequence of SEQ ID NO: 29. In several embodiments, 4-1BB is used as the sole transmembrane/signaling domain in the construct, however, in several embodiments, 4-1BB can be used with one or more other domains. For example, combinations of 4-1BB and CD3zeta are used in some embodiments. By way of further example, combinations of CD28, OX40, 4-1BB, and/or CD3zeta are used in some embodiments.

[0486] In some embodiments, the intracellular signaling region comprises a CD28 co-stimulatory domain. In some embodiments, the intracellular signaling region comprises a CD28 co-stimulatory domain and CD3zeta. In several embodiments, the signaling domain comprises a CD28 domain. In several embodiments the CD28 domain is an intracellular signaling domain. In several embodiments, the CD28 intracellular signaling domain comprises the amino acid sequence of SEQ ID NO: 31. In several embodiments, the CD28 intracellular signaling domain is truncated or modified and is at least 70%, at least 75%, at least 80%, at least 85%, at least 90%, at least 95% homologous with the CD28 intracellular signaling domain having the sequence of SEQ ID NO: 31. In several embodiments, CD28 is used as the sole transmembrane/signaling domain in the construct, however, in several embodiments, CD28 can be used with one or more other domains. For example, combinations of CD28 and CD3zeta are used in some embodiments. By way of further example, combinations of CD28, OX40, 4-1BB, and/or CD3zeta are used in some embodiments.

[0487] In some embodiments, the intracellular signaling region comprises a DAP10 co-stimulatory domain. In some embodiments, the intracellular signaling region comprises a DAP10 co-stimulatory domain and CD3zeta.

[0488] In some embodiments, the intracellular signaling region comprises an ICOS co-stimulatory domain. In some embodiments, the intracellular signaling region comprises an ICOS co-stimulatory domain and CD3zeta.

[0489] In any of the provided embodiments, the nucleic acid encoding the chimeric receptor, or a portion thereof, is codon-optimized. In some embodiments, the polynucleotides are optimized, or contain certain features designed for optimization, such as for codon usage, to reduce RNA heterogeneity and/or to modify, e.g., increase or render more consistent among cell product lots, expression, such as surface expression, of the encoded receptor. In some embodiments, polynucleotides, encoding chimeric receptors, are modified as compared to a reference polynucleotide, such as to remove cryptic or hidden splice sites, to reduce RNA heterogeneity. In some embodiments, polynucleotides, encoding chimeric receptors, are codon optimized, such as for expression in a mammalian, e.g., human, cell such as in a human T cell. In some aspects, the modified polynucleotides result in in improved, e.g., increased or more uniform or more consistent level of, expression, e.g., surface expression, when expressed in a cell.

### Stimulatory Molecules

[0490] In some embodiments, the intracellular signaling domain of a chimeric receptor provided herein comprises a co-stimulatory signaling domain, including any of those as described in the preceding section. Thus, in some embodiments of the compositions and methods described herein relate to chimeric receptors (e.g., tumor antigen-directed CARs and/or tumor ligand-directed chimeric receptors) that comprise an intracellular co-stimulatory molecule.

[0491] In addition to the various transmembrane domains and signaling domains (and the combination transmembrane/signaling domains), additional co-activating molecules (“stimulatory molecules”) can be provided, in several embodiments. These can be certain molecules that, for example, further enhance activity of the immune cells. Cytokines may be used in some embodiments. For example, certain interleukins, such as IL-2 and/or IL-15 as non-limiting examples, are used. In some embodiments, the immune cells for therapy are engineered to express such molecules as a secreted form. In additional embodiments, such stimulatory molecules are engineered to be membrane bound, acting as autocrine stimulatory molecules (or even as paracrine stimulators to neighboring cells).

[0492] In several embodiments, NK cells are engineered to express interleukin-15 (IL15). In several embodiments, NK cells are engineered to express membrane-bound interleukin 15 (mbIL15). In such embodiments, mbIL15 expression on the NK enhances the cytotoxic effects of the engineered NK cell by enhancing the proliferation and/or longevity of the NK cells. In some embodiments, the IL15 is expressed from a separate cassette on the construct comprising any one of the CARs disclosed herein. In some embodiments, the IL15 is expressed from the same cassette as any one of the CARs disclosed herein. In some embodiments, the chimeric receptor and IL15 are separated by a nucleic acid sequence encoding a cleavage site, for example, a proteolytic cleavage site or a T2A, P2A, E2A. or F2A self-cleaving peptide cleavage site. In some embodiments, the chimeric receptor and the IL15 (e.g., mbIL15) are separated by a 2A self-cleaving peptide. In some embodiments, the chimeric receptor and IL15 are separated by a T2A peptide (e.g., SEQ ID NO:10, encoded by SEQ ID NO:9). In some embodiments, the IL15 is a membrane-bound IL15 (mbIL15). Thus, in some embodiments, the chimeric receptor and the mbIL15 are separated by a T2A peptide.

[0493] In several embodiments, T cells, such as the genetically engineered non-alloreactive T cells disclosed herein are engineered to express membrane-bound interleukin 15 (mbIL15). In such embodiments, mbIL15 expression on the T cell enhances the cytotoxic effects of the engineered T cell by enhancing the activity and/or propagation (e.g., longevity) of the engineered T cells.

[0494] In some embodiments, the mbIL15 comprises a native IL15 sequence, such as a human native IL15 sequence, and at least one transmembrane domain. In several embodiments, IL15 is encoded by the nucleic acid sequence of SEQ ID NO: 11. In several embodiments, IL15 can be truncated or modified, such that it is encoded by a nucleic acid sequence that has at least 70%, at least 75%, at least 80%, at least 85%, at least 90%, at least 95% sequence identity with the sequence of SEQ ID NO: 11. In several embodiments, the IL15 comprises the amino acid sequence of SEQ ID NO: 12. In several embodiments, the IL15 is truncated or modified and is at least 70%, at least 75%, at least 80%, at least 85%, at least 90%, at least 95% homologous with the IL15 having the sequence of SEQ ID NO: 12.

[0495] In some embodiments, the mbIL15 is membrane-bound by virtue of the fusion of IL15 to a transmembrane domain. In some embodiments, the transmembrane domain comprises a hinge. In some embodiments, the transmembrane domain comprises a transmembrane region. In some embodiments, the transmembrane domain comprises a hinge and a transmembrane region. Thus, in some embodiments, mbIL15 comprises a transmembrane domain. In some embodiments, the transmembrane domain comprises a CD8 transmembrane domain (e.g., SEQ ID NO:14). In some embodiments, the CD8 transmembrane domain comprises a CD8 transmembrane region (e.g., SEQ ID NO:4). In some embodiments, the mbIL15 may comprise additional components, such as a leader sequence and/or a hinge sequence. In some embodiments, the leader sequence is a CD8 leader sequence. In some embodiments, the hinge sequence is a CD8 hinge sequence (e.g., SEQ ID NO:2). In some embodiments, the mbIL15 comprises a native IL15 sequence, such as a human native IL15 sequence, and at least one transmembrane domain. In several embodiments, the mbIL15 is truncated or modified and is at least 70%, at least 75%, at least 80%, at least 85%, at least 90%, at least 95% sequency identity with the mbIL15 having the sequence of SEQ ID NO: 391. In several embodiments, the mbIL15 comprises the amino acid sequence of SEQ ID NO: 391. In several embodiments, mbIL15 is encoded by a nucleic acid sequence that is at least 70%, at least 75%, at least 80%, at least 85%, at least 90%, at least 95% sequence identity with the sequence of SEQ ID NO: 390. In several embodiments, mbIL15 is encoded by the nucleic acid sequence of SEQ ID NO: 390. It is contemplated that any of the amino acid sequences provided herein may be provided with or without a signal sequence (e.g., a CD8a signal sequence, such as MALPVTALLLPLALLLHAARP). In several embodiments, the mbIL15 comprises the amino acid sequence set forth in SEQ ID NO:995.

[0496] Membrane-bound IL15 sequences are described in PCT publications WO 2018/183385 and WO 2020/056045, each of which is hereby expressly incorporated by reference in its entirety.

[0497] In some embodiments, the tumor antigen-directed CARs and/or tumor ligand-directed chimeric receptors are encoded by a polynucleotide that includes one or more cytosolic protease cleavage sites, for example a T2A cleavage site, a P2A cleavage site, an E2A cleavage site, and/or a F2A cleavage site. Such sites are recognized and cleaved by a cytosolic protease, which can result in separation (and separate expression) of the various component parts of the receptor encoded by the polynucleotide. As a result, depending on the embodiment, the various constituent parts of an engineered cytotoxic receptor complex can be delivered to an NK cell or T cell in a single vector or by multiple vectors. Thus, as shown schematically, in the Figures, a construct can be encoded by a single polynucleotide, but also include a cleavage site, such that downstream elements of the constructs are expressed by the cells as a separate protein (as is the case in some embodiments with IL-15). In several embodiments, a T2A cleavage site is used. In several embodiments, a T2A cleavage site is encoded by the nucleic acid sequence of SEQ ID NO: 9. In several embodiments, T2A cleavage site can be truncated or modified, such that it is encoded by a nucleic acid sequence that has at least 70%, at least 75%, at least 80%, at least 85%, at least 90%, at least 95% sequence identity with the sequence of SEQ ID NO: 9. In several embodiments, the T2A cleavage site comprises the amino acid sequence of SEQ ID NO: 10. In several embodiments, the T2A cleavage site is truncated or modified. In several embodiments, the T2A cleavage site is truncated or modified and is at least 70%, at least 75%, at least 80%, at least 85%, at least 90%, at least 95% homologous with the T2A cleavage site having the sequence of SEQ ID NO: 10.

### Cytotoxic Receptor Complex Constructs

[0498] Some embodiments of the compositions and methods described herein relate to chimeric antigen receptors, such as a CD19-directed chimeric receptor, as well as chimeric receptors, such as an activating chimeric receptor (ACR) that target a ligand of NKG2D. In some embodiments, the compositions and methods described herein related to CD70-directed chimeric receptors, BCMA-directed chimeric receptors, or cells (e.g., NK cells) expressing the same. In some embodiments, the compositions and methods described herein related to CD70-directed chimeric receptors and cells (e.g., NK cells) expressing the same. In some embodiments, the compositions and methods described herein related to BCMA-directed chimeric receptors and cells (e.g., NK cells) expressing the same. The expression of these cytotoxic receptor complexes in immune cells, such as genetically modified non-alloreactive T cells and/or NK cells, allows the targeting and destruction of particular target cells, such as cancerous cells. Non-limiting examples of such cytotoxic receptor complexes are discussed in more detail below.

### Chimeric Antigen Receptor Cytotoxic Receptor Complex Constructs

[0499] In several embodiments, there are provided for herein a variety of cytotoxic receptor complexes (also referred to as cytotoxic receptors) are provided for herein with the general structure of a chimeric antigen receptor. FIGS. 1A-1D show non-limiting schematics of constructs that include a tumor binding moiety that binds to tumor antigens or tumor-associated antigens expressed on the surface of cancer cells and activates the engineered cell expressing the chimeric antigen receptor.

[0500] As shown in FIG. 1A, for example, several embodiments of the chimeric receptor include an anti-tumor binder, a CD8a hinge domain, a CD8a transmembrane domain, an OX40 domain, a CD3(ITAM domain and in some embodiments (see e.g., FIG. 1A, CARb) a 2A cleavage site, and a membrane-bound IL-15 domain (though, as above, in several embodiments soluble IL-15 is used). In the Figures, the CARa is representative of the polypeptide structure as would be expressed by an immune cell such that the tumor binder is extracellular and able to bind the target marker on tumor cells. CARb can be considered as an embodiment of a polynucleotide that bicistronically encodes the CAR polypeptide and mbIL-15, which will be expressed as a separate protein. In several embodiments, the CAR targets NKG2D ligands (see, e.g., FIG. 1B), CD19 (see, e.g., FIG. 1C), or CD70 (see, e.g., FIG. 1D). It shall be appreciated that these schematics are non-limiting and other structural elements of a CAR as disclosed herein can be used, and likewise other tumor markers can be targeted.

[0501] In several embodiments, the general structure of the chimeric antigen receptor construct includes a hinge and/or transmembrane domain. These may, in some embodiments, be fulfilled by a single domain, or a plurality of subdomains may be used, in several embodiments. The receptor complex further comprises a signaling domain, which transduces signals after binding of the homing moiety to the target cell, ultimately leading to the cytotoxic effects on the target cell. In several embodiments, the complex further comprises a co-stimulatory domain, which operates, synergistically, in several embodiments, to enhance the function of the signaling domain. Expression of these complexes in immune cells, such as T cells and/or NK cells, allows the targeting and destruction of particular target cells, such as cancerous cells that express a given tumor marker. Some such receptor complexes comprise an extracellular domain comprising an anti-CD19 moiety, or CD19-binding moiety, that binds CD19 on the surface of target cells and activates the engineered cell. The CD3zeta ITAM subdomain may act in concert as a signaling domain. The IL-15 domain, e.g., mbIL-15 domain, may act as a co-stimulatory domain. The IL-15 domain, e.g. mbIL-15 domain, may render immune cells (e.g., NK or T cells) expressing it particularly efficacious against target tumor cells. It shall be appreciated that the IL-15 domain, such as an mbIL-15 domain, can, in accordance with several embodiments, be encoded on a separate construct. Additionally, each of the components may be encoded in one or more separate constructs. In some embodiments, the cytotoxic receptor or CD19-directed receptor comprises a sequence of amino acids that is at least 70%, 75%, 80%, 85%, 90%, 91%, 92%, 93%, 94%, 95%, 96%, 97%, 98%, 99%, or more, or a range defined by any two of the aforementioned percentages, identical to the sequence of SEQ ID NO: 34. In some embodiments, the cytotoxic receptor or CD19-directed receptor comprises the amino acid sequence set forth in SEQ ID NO:34.

[0502] Depending on the embodiment, various binders can be used to target CD19. In several embodiments, peptide binders are used, while in some embodiments antibodies, or fragments thereof are used. In several embodiments employing antibodies, antibody sequences are optimized, humanized or otherwise manipulated or mutated from their native form in order to increase one or more of stability, affinity, avidity or other characteristic of the antibody or fragment. In several embodiments, an antibody is provided that is specific for CD19. In several embodiments, an scFv is provided that is specific for CD19. In several embodiments, the antibody or scFv specific for CD19 comprises a heavy chain variable comprising the amino acid sequence of SEQ ID NO: 104 or 106. In some embodiments, the heavy chain variable comprises a sequence of amino acids that is at least 70%, 75%, 80%, 85%, 90%, 91%, 92%, 93%, 94%, 95%, 96%, 97%, 98%, 99%, or more, identical to the sequence of SEQ ID NO. 104 or 106. In some embodiments, the heavy chain variable comprises a sequence of amino acids that is encoded by a polynucleotide that hybridizes under moderately stringent conditions to the complement of a polynucleotide that encodes a heavy chain variable of SEQ ID NO. 104 or 106. In some embodiments, the heavy chain variable domain a sequence of amino acids that is encoded by a polynucleotide that hybridizes under stringent conditions to the complement of a polynucleotide that encodes a heavy chain variable encodes a heavy chain variable of SEQ ID NO. 104 or 106. In several embodiments, the heavy chain variable region comprises the CDR-H1, the CDRH-2, and the CDRH-3 as comprised within the amino acid sequence set forth in SEQ ID NO:104. In several embodiments, the heavy chain variable region comprises the CDR-H1, the CDRH-2, and the CDRH-3 as comprised within the amino acid sequence set forth in SEQ ID NO:106.

[0503] In several embodiments, the antibody or scFv specific for CD19 comprises a lightchain variable comprising the amino acid sequence of any of SEQ ID NO. 105 or 107. In several embodiments, the light chain variable comprises a sequence of amino acids that is encoded by a nucleotide sequence that is at least 70%, 75%, 80%, 85%, 90%, 91%, 92%, 93%, 94%, 95%, 96%, 97%, 98%, 99%, or more, identical to the identical to the sequence of SEQ ID NO. 105 or 107. In some embodiments, the light chain variable comprises a sequence of amino acids that is encoded by a polynucleotide that hybridizes under moderately stringent conditions to the complement of a polynucleotide that encodes a light chain variable of SEQ ID NO. 105 or 107. In some embodiments, the light chain variable domain comprises a sequence of amino acids that is encoded by a polynucleotide that hybridizes under stringent conditions to the complement of a polynucleotide that encodes a light chain variable domain of SEQ ID NO. 105 or 107. In several embodiments, the light chain variable region comprises the CDR-L1, the CDRL-2, and the CDRL-3 as comprised within the amino acid sequence set forth in SEQ ID NO:105. In several embodiments, the light chain variable region comprises the CDR-L1, the CDRL-2, and the CDRL-3 as comprised within the amino acid sequence set forth in SEQ ID NO:107.

[0504] In several embodiments, the anti-CD19 antibody or scFv comprises one, two, or three heavy chain complementarity determining region (CDR) and one, two, or three light chain CDRs. In several embodiments, a first heavy chain CDR has the amino acid sequence of SEQ ID NO: 111. In some embodiments, the first heavy chain CDR comprises a sequence of amino acids that is at least 70%, 75%, 80%, 85%, 90%, 91%, 92%, 93%, 94%, 95%, 96%, 97%, 98%, 99%, or more, identical to the sequence of SEQ ID NO. 111. In several embodiments, a second heavy chain CDR has the amino acid sequence of SEQ ID NO: 112, 113, or 114. In some embodiments, the second heavy chain CDR comprises a sequence of amino acids that is at least 70%, 75%, 80%, 85%, 90%, 91%, 92%, 93%, 94%, 95%, 96%, 97%, 98%, 99%, or more, identical to the sequence of SEQ ID NO. 112, 113, or 114. In several embodiments, a third heavy chain CDR has the amino acid sequence of SEQ ID NO: 115. In some embodiments, the third heavy chain CDR comprises a sequence of amino acids that is at least 70%, 75%, 80%, 85%, 90%, 91%, 92%, 93%, 94%, 95%, 96%, 97%, 98%, 99%, or more, identical to the sequence of SEQ ID NO. 115.

[0505] In several embodiments, a first light chain CDR has the amino acid sequence of SEQ ID NO: 108. In some embodiments, the first light chain CDR comprises a sequence of amino acids that is at least 70%, 75%, 80%, 85%, 90%, 91%, 92%, 93%, 94%, 95%, 96%, 97%, 98%, 99%, or more, identical to the sequence of SEQ ID NO. 108. In several embodiments, a second light chain CDR has the amino acid sequence of SEQ ID NO: 109. In some embodiments, the second light chain CDR comprises a sequence of amino acids that is at least 70%, 75%, 80%, 85%, 90%, 91%, 92%, 93%, 94%, 95%, 96%, 97%, 98%, 99%, or more, identical to the sequence of SEQ ID NO. 109. In several embodiments, a third light chain CDR has the amino acid sequence of SEQ ID NO: 110. In some embodiments, the third light chain CDR comprises a sequence of amino acids that is at least 70%, 75%, 80%, 85%, 90%, 91%, 92%, 93%, 94%, 95%, 96%, 97%, 98%, 99% or more, identical to the sequence of SEQ ID NO. 110.

[0506] In several embodiments, there is provided an anti-CD19 CAR comprising the amino acid sequence of SEQ ID NO. 116. In some embodiments, there is provided an anti-CD19 CAR comprising a sequence of amino acids that is at least 70%, 75%, 80%, 85%, 90%, 91%, 92%, 93%, 94%, 95%, 96%, 97%, 98%, 99% or more, identical to the sequence of SEQ ID NO. 116.

[0507] In several embodiments, there is provided herein an anti-CD19/CD8hinge/CD8TM/4-1BB/CD3zeta chimeric antigen receptor complex. In several embodiments, this receptor complex is encoded by a nucleic acid molecule having the sequence of SEQ ID NO: 85 or a sequence that shares at least about 90%, at least about 94%, at least about 95%, at least about 96%, at least about 97%, at least about 98%, or at least about 99%, sequence identity, homology and/or functional equivalence with SEQ ID NO: 85. In several embodiments, the chimeric receptor comprises the amino acid sequence of SEQ ID NO: 86 or an amino acid sequence that shares at least about 90%, at least about 94%, at least about 95%, at least about 96%, at least about 97%, at least about 98%, or at least about 99%, sequence identity, homology and/or functional equivalence with SEQ ID NO: 86.

[0508] In several embodiments, there is provided herein an anti CD19/CD8hinge/CD8TM/OX40/CD3zeta chimeric antigen receptor complex. In several embodiments, there is provided herein an anti CD19/CD8hinge/CD8TM/OX40/CD3zeta/2A/mIL-15 chimeric antigen encoded by a nucleic acid molecule having the sequence of SEQ ID NO: 59 or a nucleic acid sequence encoding a CAR comprises a sequence that shares at least about 90%, at least about 94%, at least about 95%, at least about 96%, at least about 97%, at least about 98%, or at least about 99%, sequence identity, homology and/or functional equivalence with SEQ ID NO: 59. In several embodiments, the chimeric receptor comprises the amino acid sequence of SEQ ID NO: 60 or an amino acid sequence that shares at least about 90%, at least about 94%, at least about 95%, at least about 96%, at least about 97%, at least about 98%, or at least about 99%, sequence identity, homology and/or functional equivalence with SEQ ID NO: 60.

[0509] In several embodiments, there is provided herein an anti-CD19/CD8hinge/CD28TM/CD28/CD3zeta chimeric antigen receptor complex. In several embodiments, there is provided herein an anti-CD19moiety/CD8hinge/CD28TM/CD28/CD3zeta/2A/mIL15 chimeric antigen receptor complex. In such embodiments, the polynucleotide comprises or is composed of an anti-CD19 scFv, a CD8a hinge, a CD28 transmembrane domain, CD28 signaling domain, a CD3zeta domain a 2A cleavage site, and an mbIL-15 encoded by a nucleic acid molecule having the sequence of SEQ ID NO: 61 or a sequence that shares at least about 90%, at least about 94%, at least about 95%, at least about 96%, at least about 97%, at least about 98%, or at least about 99%, sequence identity, homology and/or functional equivalence with SEQ ID NO: 61. In several embodiments, the chimeric receptor comprises the amino acid sequence of SEQ ID NO: 62 or an amino acid sequence that shares at least about 90%, at least about 94%, at least about 95%, at least about 96%, at least about 97%, at least about 98%, or at least about 99%, sequence identity, homology and/or functional equivalence with SEQ ID NO: 62.

[0510] In several embodiments, provided herein is an anti-CD19moiety/CD8hinge/CD8aTM/ICOS/CD3zeta chimeric antigen receptor complex. In several embodiments, anti-CD19moiety/CD8hinge/CD8aTM/ICOS/CD3zeta/2A/mIL15 chimeric antigen receptor complex encoded by a nucleic acid molecule having the sequence of SEQ ID NO: 63 or a sequence that shares at least about 90%, at least about 94%, at least about 95%, at least about 96%, at least about 97%, at least about 98%, or at least about 99%, sequence identity, homology and/or functional equivalence with SEQ ID NO: 63. In several embodiments, the chimeric receptor comprises the amino acid sequence of SEQ ID NO: 64 or an amino acid sequence that shares at least about 90%, at least about 94%, at least about 95%, at least about 96%, at least about 97%, at least about 98%, or at least about 99%, sequence identity, homology and/or functional equivalence with SEQ ID NO: 64.

[0511] In several embodiments, there is provided herein a anti-CD19moiety/CD8hinge/CD8aTM/CD28/4-1BB/CD3zeta chimeric antigen receptor complex. In several embodiments, anti-CD19moiety/CD8hinge/CD8aTM/CD28/4-1BB/CD3zeta/2A/mIL-15 encoded by a nucleic acid molecule having the sequence of SEQ ID NO: 65 or a nucleic acid sequence encoding the chimeric antigen receptor comprises a sequence that shares at least about 90%, at least about 94%, at least about 95%, at least about 96%, at least about 97%, at least about 98%, or at least about 99%, sequence identity, homology and/or functional equivalence with SEQ ID NO: 65. In several embodiments, the chimeric receptor comprises the amino acid sequence of SEQ ID NO: 66 or an amino acid sequence that shares at least about 90%, at least about 94%, at least about 95%, at least about 96%, at least about 97%, at least about 98%, or at least about 99%, sequence identity, homology and/or functional equivalence with SEQ ID NO: 66

[0512] In several embodiments, there is provided herein an anti-CD19moiety/CD8hinge/NKG2DTM/OX40/CD3zeta chimeric antigen receptor complex. In several embodiments, there is provided herein an anti-CD19moiety/CD8hinge/NKG2DTM/OX40/CD3zeta/2A/mIL-15 chimeric antigen receptor complex encoded by a nucleic acid molecule having the sequence of SEQ ID NO: 67 or a sequence that shares at least about 90%, at least about 94%, at least about 95%, at least about 96%, at least about 97%, at least about 98%, or at least about 99%, sequence identity, homology and/or functional equivalence with SEQ ID NO: 67. In several embodiments, the chimeric receptor comprises the amino acid sequence of SEQ ID NO: 68 or an amino acid sequence that shares at least about 90%, at least about 94%, at least about 95%, at least about 96%, at least about 97%, at least about 98%, or at least about 99%, sequence identity, homology and/or functional equivalence with SEQ ID NO: 68.

[0513] In several embodiments, there is provided an anti-CD19moiety/CD8hinge/CD8aTM/CD40/CD3zeta chimeric antigen receptor complex. In several embodiments, there is provided an anti-CD19moiety/CD8hinge/CD8aTM/CD40/CD3zeta/2A/mIL-15 chimeric antigen receptor complex encoded by a nucleic acid molecule having the sequence of SEQ ID NO: 69 or a sequence that shares at least about 90%, at least about 94%, at least about 95%, at least about 96%, at least about 97%, at least about 98%, or at least about 99%, sequence identity, homology and/or functional equivalence with SEQ ID NO: 69. In several embodiments, the chimeric receptor comprises the amino acid sequence of SEQ ID NO: 70 or an amino acid sequence that shares at least about 90%, at least about 94%, at least about 95%, at least about 96%, at least about 97%, at least about 98%, or at least about 99%, sequence identity, homology and/or functional equivalence with SEQ ID NO: 70.

[0514] In several embodiments, there is provided herein an anti-CD19moiety/CD8hinge/CD8aTM/OX40/CD3zeta/2A/mIL-15/2A/EGFRt chimeric antigen receptor complex encoded by a nucleic acid molecule having the sequence of SEQ ID NO: 71 or a sequence that shares at least about 90%, at least about 94%, at least about 95%, at least about 96%, at least about 97%, at least about 98%, or at least about 99%, sequence identity, homology and/or functional equivalence with SEQ ID NO: 71. In several embodiments, the chimeric receptor comprises the amino acid sequence of SEQ ID NO: 72 or an amino acid sequence that shares at least about 90%, at least about 94%, at least about 95%, at least about 96%, at least about 97%, at least about 98%, or at least about 99%, sequence identity, homology and/or functional equivalence with SEQ ID NO: 72.

[0515] In several embodiments, there is provided herein an anti-CD19moiety/CD8hinge/CD8aTM/CD40 chimeric antigen receptor complex. In several embodiments, there is provided herein an anti-CD19moiety/CD8hinge/CD8aTM/CD40/CD3zeta/2A/mIL-15 chimeric antigen receptor complex encoded by a nucleic acid molecule having the sequence of SEQ ID NO: 73 or a sequence that shares at least about 90%, at least about 94%, at least about 95%, at least about 96%, at least about 97%, at least about 98%, or at least about 99%, sequence identity, homology and/or functional equivalence with SEQ ID NO: 73. In several embodiments, the chimeric receptor comprises the amino acid sequence of SEQ ID NO: 74 or an amino acid sequence that shares at least about 90%, at least about 94%, at least about 95%, at least about 96%, at least about 97%, at least about 98%, or at least about 99%, sequence identity, homology and/or functional equivalence with SEQ ID NO: 74.

[0516] In several embodiments, there is provided an anti-CD19moiety/CD8hinge/CD8aTM/CD27 chimeric antigen receptor complex. In several embodiments, there is provided an anti-CD19moiety/CD8hinge/CD8aTM/CD27/CD3zeta/2A/mIL-15 chimeric antigen receptor complex encoded by a nucleic acid molecule having the sequence of SEQ ID NO: 75 or a sequence that shares at least about 90%, at least about 94%, at least about 95%, at least about 96%, at least about 97%, at least about 98%, or at least about 99%, sequence identity, homology and/or functional equivalence with SEQ ID NO: 75. In several embodiments, the chimeric receptor comprises the amino acid sequence of SEQ ID NO: 76 or an amino acid sequence that shares at least about 90%, at least about 94%, at least about 95%, at least about 96%, at least about 97%, at least about 98%, or at least about 99%, sequence identity, homology and/or functional equivalence with SEQ ID NO: 76.

[0517] In several embodiments, there is provided an anti-CD19moiety/CD8hinge/CD8aTM/CD70/CD3zeta chimeric antigen receptor complex. In several embodiments, there is provided an anti-CD19moiety/CD8hinge/CD8aTM/CD70/CD3zeta/2A/mIL-15 chimeric antigen receptor complex encoded by a nucleic acid molecule having the sequence of SEQ ID NO: 77 or a sequence that shares at least about 90%, at least about 94%, at least about 95%, at least about 96%, at least about 97%, at least about 98%, or at least about 99%, sequence identity, homology and/or functional equivalence with SEQ ID NO: 77. In several embodiments, the chimeric receptor comprises the amino acid sequence of SEQ ID NO: 78 or an amino acid sequence that shares at least about 90%, at least about 94%, at least about 95%, at least about 96%, at least about 97%, at least about 98%, or at least about 99%, sequence identity, homology and/or functional equivalence with SEQ ID NO: 78.

[0518] In several embodiments, there is an anti-CD19moiety/CD8hinge/CD8aTM/CD161/CD3zeta chimeric antigen receptor complex. In several embodiments, there is an anti-CD19moiety/CD8hinge/CD8aTM/CD161/CD3zeta/2A/mIL-15 chimeric antigen receptor complex encoded by a nucleic acid molecule having the sequence of SEQ ID NO: 79 or a sequence that shares at least about 90%, at least about 94%, at least about 95%, at least about 96%, at least about 97%, at least about 98%, or at least about 99%, sequence identity, homology and/or functional equivalence with SEQ ID NO: 79. In several embodiments, the chimeric receptor comprises the amino acid sequence of SEQ ID NO: 80 or an amino acid sequence that shares at least about 90%, at least about 94%, at least about 95%, at least about 96%, at least about 97%, at least about 98%, or at least about 99%, sequence identity, homology and/or functional equivalence with SEQ ID NO: 80.

[0519] In several embodiments, there is provided an anti-CD19moiety/CD8hinge/CD8aTM/CD40L/CD3zeta chimeric antigen receptor complex. In several embodiments, there is provided an anti-CD19moiety/CD8hinge/CD8aTM/CD40L/CD3zeta/2A/mIL-15 chimeric antigen receptor complex encoded by a nucleic acid molecule having the sequence of SEQ ID NO: 81 or a sequence that shares at least about 90%, at least about 94%, at least about 95%, at least about 96%, at least about 97%, at least about 98%, or at least about 99%, sequence identity, homology and/or functional equivalence with SEQ ID NO: 81. In several embodiments, the chimeric receptor comprises the amino acid sequence of SEQ ID NO: 82 or an amino acid sequence that shares at least about 90%, at least about 94%, at least about 95%, at least about 96%, at least about 97%, at least about 98%, or at least about 99%, sequence identity, homology and/or functional equivalence with SEQ ID NO: 82.

[0520] In several embodiments, there is provided an anti-CD19moiety/CD8hinge/CD8aTM/CD44/CD3zeta chimeric antigen receptor complex. In several embodiments, there is provided an anti-CD19moiety/CD8hinge/CD8aTM/CD44/CD3zeta/2A/mIL-15 chimeric antigen receptor complex encoded by a nucleic acid molecule having the sequence of SEQ ID NO: 83 or a sequence that shares at least about 90%, at least about 94%, at least about 95%, at least about 96%, at least about 97%, at least about 98%, or at least about 99%, sequence identity, homology and/or functional equivalence with SEQ ID NO: 83. In several embodiments, the chimeric receptor comprises the amino acid sequence of SEQ ID NO: 84 or an amino acid sequence that shares at least about 90%, at least about 94%, at least about 95%, at least about 96%, at least about 97%, at least about 98%, or at least about 99%, sequence identity, homology and/or functional equivalence with SEQ ID NO: 84.

[0521] In several embodiments, there is provided a chimeric receptor comprising an anti-CD123 binding domain, a CD8a hinge, a CD8a transmembrane region, an OX-40 co-stimulatory domain, and CD3zeta. In several embodiments, there is provided a polynucleotide encoding an anti CD123/CD8a hinge/CD8a transmembrane domain/OX40/CD3zeta chimeric antigen receptor complex encoded by a nucleic acid molecule comprising a sequence obtained from a combination of sequences disclosed herein, or comprises an amino acid sequence obtained from a combination of sequences disclosed herein. In several embodiments, the encoding nucleic acid sequence, or the amino acid sequence, comprises a sequence in accordance with one or more SEQ ID NOS as described herein, such as those included herein as examples of constituent parts. In several embodiments, the encoding nucleic acid sequence, or the amino acid sequence, comprises a sequence that shares at least about 90%, at least about 94%, at least about 95%, at least about 96%, at least about 97%, at least about 98%, or at least about 99%, sequence identity, homology and/or functional equivalence with a sequence resulting from the combination one or more SEQ ID NOS as described herein.

[0522] In several embodiments, there is provided a chimeric receptor comprising an anti-CLDN6 binding domain, a CD8a hinge, a CD8a transmembrane region, an OX-40 co-stimulatory domain, and CD3zeta. In several embodiments, there is provided a polynucleotide encoding an anti CLDN6/CD8a hinge/CD8a transmembrane domain/OX40/CD3zeta chimeric antigen receptor complex by a nucleic acid molecule comprising a sequence obtained from a combination of sequences disclosed herein, or comprises an amino acid sequence obtained from a combination of sequences disclosed herein. In several embodiments, the encoding nucleic acid sequence, or the amino acid sequence, comprises a sequence in accordance with one or more SEQ ID NOS as described herein, such as those included herein as examples of constituent parts. In several embodiments, the encoding nucleic acid sequence, or the amino acid sequence, comprises a sequence that shares at least about 90%, at least about 94%, at least about 95%, at least about 96%, at least about 97%, at least about 98%, or at least about 99%, sequence identity, homology and/or functional equivalence with a sequence resulting from the combination one or more SEQ ID NOS as described herein.

[0523] Depending on the embodiment, various binders can be used to target CLDN6. In several embodiments, peptide binders are used, while in some embodiments antibodies, or fragments thereof are used. In several embodiments employing antibodies, antibody sequences are optimized, humanized or otherwise manipulated or mutated from their native form in order to increase one or more of stability, affinity, avidity or other characteristic of the antibody or fragment. In several embodiments, an antibody is provided that is specific for CLDN6. In several embodiments, an scFv is provided that is specific for CLDN6. In several embodiments, the antibody or scFv specific for CLDN6 comprises a heavy chain variable comprising the amino acid sequence of SEQ ID NO. 88. In some embodiments, the heavy chain variable comprises a sequence of amino acids that is at least 70%, 75%, 80%, 85%, 90%, 91%, 92%, 93%, 94%, 95%, 96%, 97%, 98%, 99%, or more, identical to the sequence of SEQ ID NO. 88. In some embodiments, the heavy chain variable comprises a sequence of amino acids that is encoded by a polynucleotide that hybridizes under moderately stringent conditions to the complement of a polynucleotide that encodes a heavy chain variable of SEQ ID NO. 88. In some embodiments, the heavy chain variable domain a sequence of amino acids that is encoded by a polynucleotide that hybridizes under stringent conditions to the complement of a polynucleotide that encodes a heavy chain variable encodes a heavy chain variable of SEQ ID NO. 88.

[0524] In several embodiments, the antibody or scFv specific for CLDN6 comprises a light chain variable comprising the amino acid sequence of any of SEQ ID NO. 89, 90, or 91. In several embodiments, the light chain variable comprises a sequence of amino acids that is encoded by a nucleotide sequence that is at least 70%, 75%, 80%, 85%, 90%, 91%, 92%, 93%, 94%, 95%, 96%, 97%, 98%, 99%, or more, identical to the identical to the sequence of SEQ ID NO. 89, 90, or 91. In some embodiments, the light chain variable comprises a sequence of amino acids that is encoded by a polynucleotide that hybridizes under moderately stringent conditions to the complement of a polynucleotide that encodes a light chain variable of SEQ ID NO. 89, 90, or 91. In some embodiments, the light chain variable domain comprises a sequence of amino acids that is encoded by a polynucleotide that hybridizes under stringent conditions to the complement of a polynucleotide that encodes a light chain variable domain of SEQ ID NO. 89, 90, or 91.

[0525] In several embodiments, the anti-CLDN6 antibody or scFv comprises one, two, or three heavy chain complementarity determining region (CDR) and one, two, or three light chain CDRs. In several embodiments, a first heavy chain CDR has the amino acid sequence of SEQ ID NO: 92. In some embodiments, the first heavy chain CDR comprises a sequence of amino acids that is at least 70%, 75%, 80%, 85%, 90%, 91%, 92%, 93%, 94%, 95%, 96%, 97%, 98%, 99%, or more, identical to the sequence of SEQ ID NO. 92. In several embodiments, a second heavy chain CDR has the amino acid sequence of SEQ ID NO: 93. In some embodiments, the second heavy chain CDR comprises a sequence of amino acids that is at least 70%, 75%, 80%, 85%, 90%, 91%, 92%, 93%, 94%, 95%, 96%, 97%, 98%, 99%, or more, identical to the sequence of SEQ ID NO. 93. In several embodiments, a third heavy chain CDR has the amino acid sequence of SEQ ID NO: 94. In some embodiments, the third heavy chain CDR comprises a sequence of amino acids that is at least 70%, 75%, 80%, 85%, 90%, 91%, 92%, 93%, 94%, 95%, 96%, 97%, 98%, 99%, or more, identical to the sequence of SEQ ID NO. 94.

[0526] In several embodiments, a first light chain CDR has the amino acid sequence of SEQ ID NO: 95, 98, or 101. In some embodiments, the first light chain CDR comprises a sequence of amino acids that is at least 70%, 75%, 80%, 85%, 90%, 91%, 92%, 93%, 94%, 95%, 96%, 97%, 98%, 99%, or more, identical to the sequence of SEQ ID NO. 95, 98, or 101. In several embodiments, a second light chain CDR has the amino acid sequence of SEQ ID NO: 96, 99, or 102. In some embodiments, the second light chain CDR comprises a sequence of amino acids that is at least 70%, 75%, 80%, 85%, 90%, 91%, 92%, 93%, 94%, 95%, 96%, 97%, 98%, 99%, or more, identical to the sequence of SEQ ID NO. 96, 99, or 102. In several embodiments, a third light chain CDR has the amino acid sequence of SEQ ID NO: 97, 100, or 103. In some embodiments, the third light chain CDR comprises a sequence of amino acids that is at least 70%, 75%, 80%, 85%, 90%, 91%, 92%, 93%, 94%, 95%, 96%, 97%, 98%, 99%, or more, identical to the sequence of SEQ ID NO. 97, 100, or 103.

[0527] Advantageously, in several embodiments, the CLDN6 CARs are highly specific to CLDN6 and do not substantially bind to any of CLDN3, 4, or 9.

[0528] In several embodiments, there is provided a chimeric receptor comprising an anti-BCMA binding domain, a CD8a hinge, a CD8a transmembrane region, an OX-40 co-stimulatory domain, and CD3zeta. In several embodiments, there is provided a polynucleotide encoding an anti BCMA/CD8a hinge/CD8a transmembrane domain/OX40/CD3zeta chimeric antigen receptor complex encoded by a nucleic acid molecule comprising a sequence obtained from a combination of sequences disclosed herein, or comprises an amino acid sequence obtained from a combination of sequences disclosed herein. In several embodiments, the encoding nucleic acid sequence, or the amino acid sequence, comprises a sequence in accordance with one or more SEQ ID NOS as described herein, such as those included herein as examples of constituent parts. In several embodiments, the encoding nucleic acid sequence, or the amino acid sequence, comprises a sequence that shares at least about 90%, at least about 94%, at least about 95%, at least about 96%, at least about 97%, at least about 98%, or at least about 99%, sequence identity, homology and/or functional equivalence with a sequence resulting from the combination one or more SEQ ID NOS as described herein. It shall be appreciated that certain sequence variability, extensions, and/or truncations of the disclosed sequences may result when combining sequences, as a result of, for example, ease or efficiency in cloning (e.g., for creation of a restriction site). Additional information about anti-BCMA CARs for use in the presently disclosed methods and compositions can be found in International Patent Publication No. WO 2021/146147, which is incorporated in its entirety by reference herein. Additional information about anti-BCMA CARs for use in the presently disclosed methods and compositions can also be found in International Patent Publication No. WO2023288185, which is incorporated in its entirety by reference herein.

[0529] In several embodiments, there is provided a chimeric receptor comprising an anti-HER2 binding domain, a CD8a hinge, a CD8a transmembrane region, an OX-40 co-stimulatory domain, and CD3zeta. In several embodiments, there is provided a polynucleotide encoding an anti HER2/CD8a hinge/CD8a transmembrane domain/OX40/CD3zeta chimeric antigen receptor complex encoded by a nucleic acid molecule comprising a sequence obtained from a combination of sequences disclosed herein, or comprises an amino acid sequence obtained from a combination of sequences disclosed herein. In several embodiments, the encoding nucleic acid sequence, or the amino acid sequence, comprises a sequence in accordance with one or more SEQ ID NOS as described herein, such as those included herein as examples of constituent parts. In several embodiments, the encoding nucleic acid sequence, or the amino acid sequence, comprises a sequence that shares at least about 90%, at least about 94%, at least about 95%, at least about 96%, at least about 97%, at least about 98%, or at least about 99%, sequence identity, homology and/or functional equivalence with a sequence resulting from the combination one or more SEQ ID NOS as described herein.

[0530] In several embodiments, there is provided a chimeric receptor comprising NKG2D or a fragment thereof, a CD8a hinge, a CD8a transmembrane region, an OX-40 co-stimulatory domain, and CD3zeta. In several embodiments, there is provided a polynucleotide encoding an NKG2D/CD8a hinge/CD8a transmembrane domain/OX40/CD3zeta activating chimeric receptor complex (see FIG. 1B). The polynucleotide comprises or is composed of a fragment of the NKG2D receptor capable of binding a ligand of the NKG2D receptor, a CD8alpha hinge, a CD8a transmembrane domain, an OX40 domain, and a CD3zeta domain as described herein. In several embodiments, this receptor complex is encoded by a nucleic acid molecule comprising the nucleic acid sequence of SEQ ID NO: 145. In yet another embodiment, this chimeric receptor is encoded by the amino acid sequence of SEQ ID NO: 174. In some embodiments, the sequence of the chimeric receptor may vary from SEQ ID NO. 145, but remains, depending on the embodiment, at least 70%, at least 75%, at least 80%, at least 85%, at least 90%, or at least 95% homologous with SEQ ID NO. 145. In several embodiments, while the chimeric receptor may vary from SEQ ID NO. 145, the chimeric receptor retains, or in some embodiments, has enhanced. NK cell activating and/or cytotoxic function. Additionally, in several embodiments, this construct can optionally be designed to co-express mbIL15 (FIG. 1B). Additional information about chimeric receptors for use in the presently disclosed methods and compositions can be found in US Patent Publication No. 2020/0131244, which is incorporated in its entirety by reference herein.

[0531] In several embodiments, there is provided a chimeric receptor comprising an anti-CD70 binding domain, a CD8a hinge, a CD8a transmembrane region, an OX-40 co-stimulatory domain, and CD3zeta. In several embodiments, there is provided a polynucleotide encoding an anti CD70/CD8a hinge/CD8a transmembrane domain/OX40/CD3zeta chimeric antigen receptor complex. The polynucleotide comprises or is composed of an anti CD70 binding moiety, a CD8alpha hinge, a CD8a transmembrane domain, an OX40 domain, and a CD3zeta domain as described herein. In several embodiments, this receptor complex is encoded by a nucleic acid molecule comprising a sequence obtained from a combination of sequences disclosed herein or comprises an amino acid sequence obtained from a combination of sequences disclosed herein. In several embodiments, the encoding nucleic acid sequence, or the amino acid sequence, comprises a sequence in accordance with one or more of SEQ ID NOs: 209-374 or 599-681, such as those included herein as examples of constituent parts. In several embodiments, the encoding nucleic acid sequence, or the amino acid sequence, comprises a sequence that shares at least about 90%, at least about 94%, at least about 95%, at least about 96%, at least about 97%, at least about 98%, or at least about 99%, sequence identity, homology and/or functional equivalence with a sequence resulting from the combination one or more SEQ ID NOS: 209-374 or 599-681 as described herein. It shall be appreciated that certain sequence variability, extensions, and/or truncations of the disclosed sequences may result when combining sequences, as a result of, for example, ease or efficiency in cloning (e.g., for creation of a restriction site). In several embodiments, there is provided a CD70 CAR construct that for which the polynucleotide also comprises mbIL15, as disclosed herein. Additional information about anti-CD70 CAR for use in the presently disclosed methods and compositions can be found in U.S. Patent Publication No. 2022/0002424 (corresponding to International Patent Publication NO. WO2021252804), which is incorporated in its entirety by reference herein.

[0532] In several embodiments, there is provided a chimeric receptor comprising an anti-mesothelin binding domain, a CD8a hinge, a CD8a transmembrane region, an OX-40 co-stimulatory domain, and CD3zeta. In several embodiments, there is provided a polynucleotide encoding an anti mesothelin/CD8a hinge/CD8a transmembrane domain/OX40/CD3zeta chimeric antigen receptor complex encoded by a nucleic acid molecule comprising a sequence obtained from a combination of sequences disclosed herein, or comprises an amino acid sequence obtained from a combination of sequences disclosed herein. In several embodiments, the encoding nucleic acid sequence, or the amino acid sequence, comprises a sequence in accordance with one or more SEQ ID NOS as described herein, such as those included herein as examples of constituent parts. In several embodiments, the encoding nucleic acid sequence, or the amino acid sequence, comprises a sequence that shares at least about 90%, at least about 94%, at least about 95%, at least about 96%, at least about 97%, at least about 98%, or at least about 99%, sequence identity, homology and/or functional equivalence with a sequence resulting from the combination one or more SEQ ID NOS as described herein.

[0533] In several embodiments, there is provided a chimeric receptor comprising an anti-PD-L1 binding domain, a CD8a hinge, a CD8a transmembrane region, an OX-40 co-stimulatory domain, and CD3zeta. In several embodiments, there is provided a polynucleotide encoding an anti PD-L1/CD8a hinge/CD8a transmembrane domain/OX40/CD3zeta chimeric antigen receptor complex is encoded by a nucleic acid molecule comprising a sequence obtained from a combination of sequences disclosed herein, or comprises an amino acid sequence obtained from a combination of sequences disclosed herein. In several embodiments, the encoding nucleic acid sequence, or the amino acid sequence, comprises a sequence in accordance with one or more SEQ ID NOS as described herein, such as those included herein as examples of constituent parts. In several embodiments, the encoding nucleic acid sequence, or the amino acid sequence, comprises a sequence that shares at least about 90%, at least about 94%, at least about 95%, at least about 96%, at least about 97%, at least about 98%, or at least about 99%, sequence identity, homology and/or functional equivalence with a sequence resulting from the combination one or more SEQ ID NOS as described herein.

[0534] In several embodiments, there is provided a chimeric receptor comprising an anti-EGFR binding domain, a CD8a hinge, a CD8a transmembrane region, an OX-40 co-stimulatory domain, and CD3zeta. In several embodiments, there is provided a polynucleotide encoding an anti EGFR/CD8a hinge/CD8a transmembrane domain/OX40/CD3zeta chimeric antigen receptor complex encoded by a nucleic acid molecule comprising a sequence obtained from a combination of sequences disclosed herein, or comprises an amino acid sequence obtained from a combination of sequences disclosed herein. In several embodiments, the encoding nucleic acid sequence, or the amino acid sequence, comprises a sequence in accordance with one or more SEQ ID NOS as described herein, such as those included herein as examples of constituent parts. In several embodiments, the encoding nucleic acid sequence, or the amino acid sequence, comprises a sequence that shares at least about 90%, at least about 94%, at least about 95%, at least about 96%, at least about 97%, at least about 98%, or at least about 99%, sequence identity, homology and/or functional equivalence with a sequence resulting from the combination one or more SEQ ID NOS as described herein.

[0535] In several embodiments, an expression vector, such as a MSCV-IRES-GFP plasmid, a non-limiting example of which is provided in SEQ ID NO: 87, is used to express any of the chimeric antigen receptors provided for herein.

### Methods of Treatment

[0536] Provided herein are methods of treatment, e.g., comprising administering any of the engineered immune cells described herein or a composition containing engineered immune cells. In some aspects, also provided are methods of administering any of the engineered immune cells described herein or a composition containing engineered immune cells to a subject (e.g., a subject having a disease or condition). In some aspects, there is also provided a use of any of the engineered immune cells described herein or a composition containing the engineered immune cells for treating a disease or condition. In some aspects, there is also provided a use of any of the engineered immune cells described herein or a composition containing the engineered immune cells for the manufacture of a medicament to treat a disease or condition. In some aspects, also provided is any of the engineered immune cells described herein or a composition containing the engineered immune cells for use in treating a disease or condition, or for administration to a subject having a disease or condition.

[0537] Also provided herein are methods of using any of the chimeric receptors described herein in the preparation of a medicament for treating a disease or condition. Also provided herein is use of any of the chimeric receptors described herein for treating a disease or condition.

[0538] Diseases and disorders include tumors, including solid tumors, hematologic malignancies, and melanoma, and include local and metastatic tumors; infectious diseases, such as infection by a virus or other pathogen, e.g., HIV, HCV, HBV, CMV, HPV and parasitic diseases; and autoimmune and inflammatory diseases. In some embodiments, the disease or condition is a tumor, cancer, malignancy, neoplasm, or other proliferative disease or condition. In some embodiments, the disease or condition is an infectious disease or condition, such as, but not limited to, viral, retroviral, bacterial and protozoal infections, immunodeficiency, Cytomegalovirus (CMV), epstein-barr virus (EBV), adenovirus, BK polyoma virus. In some embodiments, the disease or condition is an autoimmune or inflammatory disease or condition, such as arthritis (e.g., Rheumatoid Arthritis (RA)), type I diabetes, Systemic Lupus Erythematosus (SLE), inflammatory bowel disease, psoriasis, scleroderma, autoimmune thyroid disease, Graces' disease, Crohn's disease, multiple sclerosis (MS), asthma, and/or a disease or condition associated with transplantation. In some embodiments, the disease or condition is an autoimmune disease. In some embodiments, the disease or condition is RA. In some embodiments, the disease or disease is SLE. In some embodiments, the disease is MS.

[0539] In some embodiments, the disease or condition is cancer. Some embodiments relate to a method of treating, ameliorating, inhibiting, or preventing cancer with a cell or immune cell comprising a chimeric antigen receptor and/or an activating chimeric receptor, as disclosed herein. In some embodiments, the method includes treating or preventing cancer. In some embodiments, the method includes administering a therapeutically effective amount of immune cells expressing a tumor-directed chimeric antigen receptor and/or tumor-directed chimeric receptor as described herein. Examples of types of cancer that may be treated as such are described herein.

[0540] Disclosed herein are methods of treating a disease or condition (e.g., cancer) in a subject. In some embodiments, the methods comprise administering to the subject any one of the immune cells described herein or a composition comprising the same, and a therapeutic agent. In some embodiments, the therapeutic agent is selected from the group consisting of a chemotherapeutic agent, a monoclonal antibody, a NK cell engager, or a combination thereof. In some embodiments, the therapeutic agent is a chemotherapeutic agent. In some embodiments, the chemotherapeutic agent comprises an antimetabolite, an alkylating agent, a topoisomerase inhibitor, a mitotic inhibitor, an antibiotic, a protein kinase inhibitor, a proteasome inhibitor, an inhibitor of poly (ADP-ribose) polymerase (PARP), or any combination thereof. In some embodiments, the therapeutic agent is an antibody (e.g., a monoclonal antibody). In some embodiments, the monoclonal antibody comprises an anti-CD20 antibody, an anti-CTLA4 antibody, an anti-EGFR antibody, an anti-HER2/neu antibody, an anti-PD1 antibody, an anti-PD-L1 antibody, an anti-VEGF antibody, or any combination thereof. In some embodiments, the therapeutic agent is a NK cell engager. In some embodiments, the NK cell engager binds to an activating receptor on an NK cell and an antigen expressed by cells of the cancer. In some embodiments, the activating receptor is selected from the group consisting of CD16, NKp30, NKp46, NKG2D, and any combination thereof.

[0541] In some embodiments, the therapeutic agent is administered prior to, concurrent with, and/or after administration of genetically engineered cells. In some embodiments, the therapeutic agent is administered prior to administration of genetically engineered cells. In some embodiments, the therapeutic agent is administered prior to treatment with a lymphodepleting therapy. In some embodiments, the therapeutic agent is administered after treatment with a lymphodepleting therapy and prior to administration of the genetically engineered cells. In some embodiments, the therapeutic agent is administered concurrently with administration of genetically engineered cells. In some embodiments, the therapeutic agent is administered after administration of genetically engineered cells.

[0542] In certain embodiments, treatment of a subject with a genetically engineered cell(s) described herein achieves one, two, three, four, or more of the following effects, including, for example: (i) reduction or amelioration the severity of disease or symptom associated therewith; (ii) reduction in the duration of a symptom associated with a disease; (iii) protection against the progression of a disease or symptom associated therewith; (iv) regression of a disease or symptom associated therewith; (v) protection against the development or onset of a symptom associated with a disease; (vi) protection against the recurrence of a symptom associated with a disease; (vii) reduction in the hospitalization of a subject; (viii) reduction in the hospitalization length; (ix) an increase in the survival of a subject with a disease; (x) a reduction in the number of symptoms associated with a disease; and (xi) an enhancement, improvement, supplementation, complementation, or augmentation of the prophylactic or therapeutic effect(s) of another therapy. Advantageously, the non-alloreactive engineered T cells disclosed herein further enhance one or more of the above. Administration can be by a variety of routes, including, without limitation, intravenous, intra-arterial, subcutaneous, intramuscular, intrahepatic, intraperitoneal and/or local delivery to an affected tissue.

### Cancer Types

[0543] Some embodiments of the compositions and methods described herein relate to administering immune cells comprising a tumor-directed chimeric antigen receptor and/or tumor-directed chimeric receptor to a subject with cancer. Various embodiments provided for herein include treatment or prevention of the following non-limiting examples of cancers. Examples of cancer include, but are not limited to, acute lymphoblastic leukemia (ALL), acute myeloid leukemia (AML), adrenocortical carcinoma, Kaposi sarcoma, lymphoma, gastrointestinal cancer, appendix cancer, central nervous system cancer, basal cell carcinoma, bile duct cancer, bladder cancer, bone cancer, brain tumors (including but not limited to astrocytomas, spinal cord tumors, brain stem glioma, craniopharyngioma, ependymoblastoma, ependymoma, medulloblastoma, medulloepithelioma), breast cancer, bronchial tumors, Burkitt lymphoma, cervical cancer, colon cancer, chronic lymphocytic leukemia (CLL), chronic myelogenous leukemia (CML), chronic myeloproliferative disorders, ductal carcinoma, endometrial cancer, esophageal cancer, gastric cancer, Hodgkin lymphoma, non-Hodgkin lymphoma, hairy cell leukemia, renal cell cancer, leukemia, oral cancer, nasopharyngeal cancer, liver cancer, lung cancer (including but not limited to, non-small cell lung cancer, (NSCLC) and small cell lung cancer), pancreatic cancer, bowel cancer, lymphoma, melanoma, ocular cancer, ovarian cancer, pancreatic cancer, prostate cancer, pituitary cancer, uterine cancer, and vaginal cancer.

[0544] In some embodiments, the cancer comprises a tumor. In some embodiments, the cancer comprises a solid tumor. In some embodiments, the cancer is a hematologic malignancy.

[0545] In some embodiments, the cancer is multiple myeloma. In some embodiments, the cancer is a leukemia or a lymphoma. In some embodiments, the cancer is a leukemia. In some embodiments, the leukemia is ALL, AML, CLL, or CML. In some embodiments, the cancer is a lymphoma. In some embodiments, the lymphoma is Hodgkin lymphoma or non-Hodgkin lymphoma (NHL). In some embodiments, the cancer is NHL. In some embodiments, the NHL is large B-cell lymphoma (LBCL). In some embodiments, the NHL is aggressive NHL. In some embodiments the NHL is a diffuse large B-cell lymphoma (DLBCL), Burkitt lymphoma, follicular lymphoma (FL, including grade 1, 2, 3a, and 3b), small lymphocytic lymphoma (SLL), mantle cell lymphoma, or marginal zone lymphoma. In some embodiments, the NHL is DLBCL. In some embodiments, the NHL is FL. In some embodiments, the NHL is mantle cell lymphoma. In some embodiments, the NHL is marginal zone lymphoma.

[0546] In some embodiments, the cancer is relapsed/refractory. In some embodiments, the cancer is relapsed refractory to a prior line of therapy. In some embodiments, the prior line of therapy comprises one prior line of therapy. In some embodiments, the prior line of therapy comprises two prior lines of therapy. In some embodiments, the prior line of therapy comprises three prior lines of therapy. n some embodiments, the prior line of therapy comprises four prior lines of therapy.

[0547] In some embodiments, the prior line of therapy comprises CAR T cells. In some embodiments, the subject is CAR T cell exposed. In some embodiments, the prior line of therapy does not comprise CAR T cells. In some embodiments, the subject is CAR T cell naïve. In some embodiments, the CAR T cells are anti-CD19 CAR T cells. In some embodiments, the CAR T cells are anti-CD70 CAR T cells. In some embodiments, the CAR T cells are anti-BCMA CAR T cells.

### Cancer Targets

[0548] The disease or condition to be treated can be any disease or condition in which expression of an antigen is associated with and/or involved in the etiology of the disease or condition, e.g., causing, exacerbating or otherwise participating in such disease or condition. Exemplary diseases and disorders can include diseases or disorders associated with malignancies or cellular transformation (e.g., cancer), autoimmune or inflammatory diseases or infectious diseases caused by, for example, bacteria, viruses, or other pathogens. Exemplary antigens are described herein, including antigens associated with various diseases and disorder that can be treated. In particular embodiments, the chimeric receptor specifically binds to an antigen associated with the disease or condition.

[0549] Some embodiments of the compositions and methods described herein relate to immune cells comprising a chimeric receptor that targets a cancer antigen. Non-limiting examples of target antigens include: CD19; CD70, TNF receptor family member B cell maturation (BCMA); CD38; DLL3; G protein coupled receptor class C group 5, member D (GPRC5D); epidermal growth factor receptor (EGFR) CD138; prostate-specific membrane antigen (PSMA); Fms Like Tyrosine Kinase 3 (FLT3); KREMEN2 (Kringle Containing Transmembrane Protein 2) CD123; CD22; CD30; CD171; CS1 (also referred to as CD2 subset 1, CRACC, SLAMF7, CD319, and 19A24); CD5, C-type lectin-like molecule-1 (CLL-1 or CLECL1); CD33; epidermal growth factor receptor variant III (EGFRviii); ganglioside G2 (GD2); ganglioside GD3 (aNeu5Ac(2-8)aNeu5Ac(2-3)bDGalp(1-4)bDGlcp(1-1)Cer); Tn antigen ((Tn Ag) or (GalNAca-Ser/Thr)); Receptor tyrosine kinase-like orphan receptor 1 (ROR1); Tumor-associated glycoprotein 72 (TAG72); CD44v6; a glycosylated CD43 epitope expressed on acute leukemia or lymphoma but not on hematopoietic progenitors, a glycosylated CD43 epitope expressed on non-hematopoietic cancers, Carcinoembryonic antigen (CEA); Epithelial cell adhesion molecule (EPCAM); B7H3 (CD276); KIT (CD117); Interleukin-13 receptor subunit alpha-2 (IL-13Ra2 or CD213A2); Mesothelin; Interleukin 11 receptor alpha (IL-11Ra); prostate stem cell antigen (PSCA); Protease Serine 21 (Testisin or PRSS21); vascular endothelial growth factor receptor 2 (VEGFR2); Lewis(Y) antigen; CD24; Platelet-derived growth factor receptor beta (PDGFR-beta); Stage-specific embryonic antigen-4 (SSEA-4); CD20; Folate receptor alpha (FRa or FRI); Folate receptor beta (FRb); Receptor tyrosine-protein kinase ERBB2 (Her2/neu); Mucin 1, cell surface associated (MUC1); epidermal growth factor receptor (EGFR); neural cell adhesion molecule (NCAM); Prostase; prostatic acid phosphatase (PAP); elongation factor 2 mutated (ELF2M); Ephrin B2; fibroblast activation protein alpha (FAP); insulin-like growth factor 1 receptor (IGF-1 receptor), carbonic anhydrase IX (CAIX); Proteasome (Prosome, Macropain) Subunit, Beta Type, 9 (LMP2); glycoprotein 100 (gplOO); oncogene fusion protein consisting of breakpoint cluster region (BCR) and Abelson murine leukemia viral oncogene homolog 1 (Abl) (bcr-abl); tyrosinase; ephrin type-A receptor 2 (EphA2); sialyl Lewis adhesion molecule (sLe); ganglioside GM3 (aNeu5Ac(2-3)bDClalp(1-4)bDGlcp(1-1)Cer); transglutaminase 5 (TGS5); high molecular weight-melanoma associated antigen (HMWMAA); o-acetyl-GD2 ganglioside (OAcGD2); tumor endothelial marker 1 (TEM1/CD248); tumor endothelial marker 7-related (TEM7R); claudin 6 (CLDN6); thyroid stimulating hormone receptor (TSHR); chromosome X open reading frame 61 (CXORF61); CD97; CD179a; anaplastic lymphoma kinase (ALK); Polysialic acid; placenta-specific 1 (PLAC1); hexasaccharide portion of globoH glycoceramide (GloboH); mammary gland differentiation antigen (NY-BR-1); uroplakin 2 (UPK2); Hepatitis A virus cellular receptor 1 (HAVCR1); adrenoceptor beta 3 (ADRB3); pannexin 3 (PANX3); G protein-coupled receptor 20 (GPR20); lymphocyte antigen 6 complex, locus K 9 (LY6K); Olfactory receptor 51E2 (OR51E2); TCR Gamma Alternate Reading Frame Protein (TARP); Wilms tumor protein (WT1); Cancer/testis antigen 1 (NY-ESO-1); Cancer/testis antigen 2 (LAGE-la); Melanoma-associated antigen 1 (MAGE-A1); ETS translocation-variant gene 6, located on chromosome 12p (ETV6-AML); sperm protein 17 (SPA17); X Antigen Family, Member 1A (XAGE1); angiopoietin-binding cell surface receptor 2 (Tie 2); melanoma cancer testis antigen-1 (MAD-CT-1); melanoma cancer testis antigen-2 (MAD-CT-2); Fos-related antigen 1; tumor protein p53 (p53); p53 mutant; prostein; survivin; telomerase; prostate carcinoma tumor antigen-1 (PCT A-1 or Galectin 8), melanoma antigen recognized by T cells 1 (MelanA or MARTI); Rat sarcoma (Ras) mutant; human Telomerase; reverse transcriptase (hTERT); sarcoma translocation breakpoints; melanoma inhibitor of apoptosis (ML-IAP); ERG (transmembrane protease, serine 2 (TMPRSS2) ETS fusion gene); N-Acetyl glucosaminyl-transferase V (NA17); paired box protein Pax-3 (PAX3); Androgen receptor; Cyclin B1; v-myc avian myelocytomatosis viral oncogene neuroblastoma derived homolog (MYCN); Ras Homolog Family Member C (RhoC); Tyrosinase-related protein 2 (TRP-2); Cytochrome P450 IB 1 (CYPIB 1); CCCTC-Binding Factor (Zinc Finger Protein)-Like (BORIS or Brother of the Regulator of imprinted Sites), Squamous Cell Carcinoma Antigen Recognized By T Cells 3 (SART3); Paired box protein Pax-5 (PAX5); proacrosin binding protein sp32 (OY-TES1); lymphocyte-specific protein tyrosine kinase (LCK); A kinase anchor protein 4 (AKAP-4); synovial sarcoma, X breakpoint 2 (SSX2); Receptor for Advanced Gly cation Endproducts (RAGE-1); renal ubiquitous 1 (RU1); renal ubiquitous 2 (RU2); legumain; human papilloma virus E6 (HPV E6); human papilloma virus E7 (HPV E7); intestinal carboxyl esterase; heat shock protein 70-2 mutated (mut hsp70-2); CD79a; CD79b; CD72; Leukocyte-associated immunoglobulin-like receptor 1 (LAIR1); Fc fragment of IgA receptor (FCAR or CD89); Leukocyte immunoglobulin-like receptor subfamily A member 2 (LILRA2); CD300 molecule-like family member f (CD300LF); C-type lectin domain family 12 member A (CLEC12A); bone marrow stromal cell antigen 2 (BST2); EGF-like module-containing mucin-like hormone receptor-like 2 (EMR2); lymphocyte antigen 75 (LY75); Glypican-3 (GPC3); Fc receptor-like 5 (FCRL5); and immunoglobulin lambda-like polypeptide 1 (IGLL1), MPL, Biotin, c-MYC epitope Tag, CD34, LAMP1 TROP2, GFRalpha4, CDH17, CDH6, NYBR1, CDH19, CD200R, Slea (CA19.9; Sialyl Lewis Antigen); Fucosyl-GMl, PTK7, gpNMB, CDH1-CD324, CD276/1B7H3, ILl lRa, IL13Ra2, CD179b-IGLll, TCRgamma-delta, NKG2D, CD32 (FCGR2A), Tn ag, Timl-/HVCR1, CSF2RA (GM-CSFR-alpha), TGFbetaR2, Lews Ag, TCR-betal chain, TCR-beta2 chain, TCR-gamma chain, TCR-delta chain, FITC, Leutenizing hormone receptor (LHR), Follicle stimulating hormone receptor (FSHR), Gonadotropin Hormone receptor (CGHR or GR), CCR4, GD3, SLAMF6, SLAMF4, HIV1 envelope glycoprotein, HTLVI-Tax, CMV pp65, EBV-EBNA3c, KSHV K8.1, KSHV-gH, influenza A hemagglutinin (HA), GAD, PDL1, Guanylyl cyclase C (GCC), auto antibody to desmoglein 3 (Dsg3), auto antibody to desmoglein 1 (Dsgl), HLA, HLA-A, HLA-A2, HLA-B, HLA-C, HLA-DP, HLA-DM, HLA-DOA, HLA-DOB, HLA-DQ, HLA-DR, HLA-G, IgE, CD99, Ras G12V, Tissue Factor 1 (TF1), AFP, Claudinl 8.2 (CLD18A2 or CLDN18A.2), P-glycoprotein, STEAP1, Livl, Nectin-4, Cripto, gpA33, BST1/CD157, low conductance chloride channel, and the antigen recognized by TNT antibody. In some embodiments, the antigen is CD19. In some embodiments, the antigen is a ligand of NKG2D. In some embodiments, the antigen is CD70. In some embodiments, the antigen is BCMA. In several embodiments, BCMA and CD138 are targeted in tandem, for example using two populations of immune cells expressing an anti-BCMA CAR or an anti-CD138 CAR or through use of a bi-specific CAR.

### Administration and Dosing

[0550] Further provided herein are methods of treating a subject having cancer, comprising administering to the subject a composition comprising immune cells (such as NK and/or T cells) engineered to express a cytotoxic receptor complex as disclosed herein. For example, some embodiments of the compositions and methods described herein relate to use of a tumor-directed chimeric antigen receptor and/or tumor-directed chimeric receptor, or use of cells expressing a tumor-directed chimeric antigen receptor and/or tumor-directed chimeric receptor, for treating a cancer patient. Uses of such engineered immune cells for treating cancer are also provided.

[0551] In certain embodiments, treatment of a subject with a genetically engineered cell(s) described herein achieves one, two, three, four, or more of the following effects, including, for example: (i) reduction or amelioration the severity of disease or symptom associated therewith; (ii) reduction in the duration of a symptom associated with a disease; (iii) protection against the progression of a disease or symptom associated therewith; (iv) regression of a disease or symptom associated therewith; (v) protection against the development or onset of a symptom associated with a disease; (vi) protection against the recurrence of a symptom associated with a disease; (vii) reduction in the hospitalization of a subject; (viii) reduction in the hospitalization length; (ix) an increase in the survival of a subject with a disease; (x) a reduction in the number of symptoms associated with a disease; and (xi) an enhancement, improvement, supplementation, complementation. or augmentation of the prophylactic or therapeutic effect(s) of another therapy. Each of these comparisons are versus, for example, a different therapy for a disease, which includes a cell-based immunotherapy for a disease using cells that do not express the constructs disclosed herein.

[0552] In some embodiments, the immune cells are obtained from a subject (e.g., a first subject) other than the subject that will receive or ultimately receives the cell therapy. In some embodiments, the immune cells are obtained from a healthy subject (e.g., a subject who does not have cancer). In such embodiments, the cells are then administered to a different subject of the same species, e.g., a second subject. In some embodiments, the immune cells are allogeneic to the subject to be treated.

[0553] In some embodiments, the first and second subjects are genetically similar. In some embodiments, the second subject expresses the same HLA class or supertype as the first subject.

[0554] Advantageously, the non-alloreactive engineered T cells disclosed herein further enhance one or more of the above.

[0555] In some embodiments, the immune cells are obtained from a subject to be treated. Thus, in some embodiments, the immune cells are autologous to the subject to be treated.

[0556] Administration can be by a variety of routes, including, without limitation, intravenous, intra-arterial, subcutaneous, intramuscular, intrahepatic, intraperitoneal and/or local delivery to an affected tissue. In some embodiments, administration of the immune cells is intravenous. In some embodiments, a given dose is administered by a single infusion of cells. In some embodiments, a given dose is administered by multiple infusions of cells, or by continuous infusion of cells. In some embodiments, administration of the cell dose or any other therapy (e.g., lymphodepletion therapy and/or combination therapy) is by outpatient delivery. In some embodiments, at least one dose of the immune cells is administrated by outpatient delivery. In some embodiments, each dose of the immune cells is administrated by outpatient delivery.

[0557] Doses of immune cells such as NK and/or T cells can be readily determined for a given subject based on their body mass, disease type and state, and desired aggressiveness of treatment, but range, depending on the embodiments, from about 10⁵ cells per kg to about 10¹² cells per kg (e.g., 10⁵-10⁷, 10⁷-10¹⁰, 10¹⁰-10¹² and overlapping ranges therein). In one embodiment, a dose escalation regimen is used. In several embodiments, a range of immune cells such as NK and/or T cells is administered, for example between about 1×10⁶ cells/kg to about 1×10⁸ cells/kg. In several embodiments, a range of NK cells is administered, for example between about 1×10⁶ cells/kg to about 1×10⁸ cells/kg. In several embodiments, a range of T cells is administered, for example between about 1×10⁶ cells/kg to about 1×10⁸ cells/kg.

[0558] In some embodiments, a dose of engineered cells comprises between about 100×10⁶ and 3×10⁹ NK cells. In some embodiments, a dose of engineered cells comprises between about 300×10⁶ and 1.5×10⁹ NK cells. In some embodiments, a dose of engineered cells comprises about 100×10⁶ NK cells. In some embodiments, a dose of engineered cells comprises about 300×10⁶ NK cells. In some embodiments, a dose of engineered cells comprises about 500×10⁶ NK cells. In some embodiments, a dose of engineered cells comprises about 1×10⁹ NK cells. In some embodiments, a dose of engineered cells comprises about 1.25×10⁹ NK cells. In some embodiments, a dose of engineered cells comprises about 1.5×10⁹ NK cells. In some embodiments, a dose of engineered cells comprises about 2×10⁹ NK cells. In some embodiments, a dose of engineered cells comprises about 2.5×10⁹ NK cells. In some embodiments, a dose of engineered cells comprises about 3×10⁹ NK cells.

[0559] In some embodiments, a dose of engineered cells comprises between about 1×10⁸ and 1×10¹⁰ chimeric receptor-expressing NK cells. In some embodiments, a dose of engineered cells comprises between about 300×10⁶ and 1.5×10⁹ chimeric receptor-expressing NK cells. In some embodiments, a dose of engineered cells comprises about 100×10⁶ chimeric receptor-expressing NK cells. In some embodiments, a dose of engineered cells comprises about 300×10⁶ chimeric receptor-expressing NK cells. In some embodiments, a dose of engineered cells comprises about 500×10⁶ chimeric receptor-expressing NK cells. In some embodiments, a dose of engineered cells comprises about 1×10⁹ chimeric receptor-expressing NK cells. In some embodiments, a dose of engineered cells comprises about 1.25×10⁹ chimeric receptor-expressing NK cells. In some embodiments, a dose of engineered cells comprises about 1.5×10⁹ chimeric receptor-expressing NK cells. In some embodiments, a dose of engineered cells comprises about 1.75×10⁹ chimeric receptor-expressing NK cells. In some embodiments, a dose of engineered cells comprises about 2×10⁹ chimeric receptor-expressing NK cells. In some embodiments, a dose of engineered cells comprises about 2.25×10⁹ chimeric receptor-expressing NK cells. In some embodiments, a dose of engineered cells comprises about 2.5×10⁹ chimeric receptor-expressing NK cells. In some embodiments, a dose of engineered cells comprises about 2.75×10⁹ chimeric receptor-expressing NK cells. In some embodiments, a dose of engineered cells comprises about 3×10⁹ chimeric receptor-expressing NK cells. In some embodiments, a dose of engineered cells comprises about 4×10⁹ chimeric receptor-expressing NK cells. In some embodiments, a dose of engineered cells comprises about 5×10⁹ chimeric receptor-expressing NK cells. In some embodiments, a dose of engineered cells comprises about 6×10⁹ chimeric receptor-expressing NK cells. In some embodiments, a dose of engineered cells comprises about 7×10⁹ chimeric receptor-expressing NK cells. In some embodiments, a dose of engineered cells comprises about 8×10⁹ chimeric receptor-expressing NK cells. In some embodiments, a dose of engineered cells comprises about 39×10⁹ chimeric receptor-expressing NK cells. In some embodiments, a dose of engineered cells comprises about 1×10¹⁰ chimeric receptor-expressing NK cells.

[0560] In some embodiments, a dose of engineered cells comprises between about 100×10⁶ and 3×10⁹ T cells. In some embodiments, a dose of engineered cells comprises between about 300×10⁶ and 1.5×10⁹ T cells. In some embodiments, a dose of engineered cells comprises about 100×10⁶ T cells. In some embodiments, a dose of engineered cells comprises about 300×10⁶ T cells. In some embodiments, a dose of engineered cells comprises about 500×10⁶ T cells. In some embodiments, a dose of engineered cells comprises about 1×10⁹T cells. In some embodiments, a dose of engineered cells comprises about 1.25×10⁹ T cells. In some embodiments, a dose of engineered cells comprises about 1.5×10⁹ T cells. In some embodiments, a dose of engineered cells comprises about 2×10⁹ T cells. In some embodiments, a dose of engineered cells comprises about 2.5×10⁹ T cells. In some embodiments, a dose of engineered cells comprises about 3×10⁹ T cells.

[0561] In some embodiments, a dose of engineered cells comprises both NK and T cells. In some embodiments, a dose of engineered cells comprises between about 100×10⁶and 3×10⁹ NK cells and between about 100×10⁶ and 3×10⁹ T cells. In some embodiments, a dose of engineered cells comprises between about 300×10⁶ and 1.5×10⁹ NK cells and between about 300×10⁶ and 1.5×10⁹ T cells. In some embodiments, a dose comprises about an equal number of NK cells and T cells. In some embodiments, a dose comprises more NK cells than T cell. In some embodiments, a dose comprises more T cells than NK cells.

[0562] In some embodiments, the immune cells are administered in a dosing cycle comprising a dose. In several embodiments, multiple doses are used, for example, two, three, four, or more doses within a dosing cycle. In some embodiments, the immune cells are administered in a dosing cycle comprising between two doses and five doses. In some embodiments, the immune cells are administered in a dosing cycle comprising two doses. In some embodiments, the immune cells are administered in a dosing cycle comprising three doses. In some embodiments, the immune cells are administered in a dosing cycle comprising four doses. In some embodiments, the immune cells are administered in a dosing cycle comprising five doses. Such multi-dose cycles can be repeated one or more times, as needed to treat a tumor and/or prevent disease progression. For example, in some embodiments, if a subject exhibits a clinical response (e.g., complete response), an additional dosing cycle is administered as a consolidation treatment. In some embodiments, if a subject exhibits a clinical response (e.g., complete response) but subsequently exhibits disease progression, an additional dosing cycle is administered as retreatment. In some embodiments, between one and five dosing cycles are administered to the subject. In some embodiments, one dosing cycle is administered to the subject. In some embodiments, two dosing cycles are administered to the subject. In some embodiments, three dosing cycles are administered to the subject. In some embodiments, four dosing cycles are administered to the subject. In some embodiments, five dosing cycles are administered to the subject. In some embodiments, no more than five dosing cycles are administered to the subject.

[0563] In some embodiments, a dosing cycle is between about 7 days and about 56 days, between about 14 days and about 42 days, or between about 21 days and about 35 days. In some embodiments, a dosing cycle is about 14 days. In some embodiments, a dosing cycle is about 21 days. In some embodiments, a dosing cycle is about 28 days. In some embodiments, a dosing cycle is about 35 days. In some embodiments, a dosing cycle is about 42 days. In some embodiments, a dosing cycle is about 49 days. In some embodiments, a dosing cycle is about 56 days.

[0564] In several embodiments, the doses of NK cells are administered over about 7 days, about 8 days, about 9 days, about 10 days, about 11 days, about 12 days, about 13 days, or about 14 days. In some embodiments, the doses of NK cells are administered over about 7 days. In some embodiments, the doses of NK cells are administered over about 8 days. In some embodiments, the doses of NK cells are administered over about 9 days. In some embodiments, the doses of NK cells are administered over about 10 days. In some embodiments, the doses of NK cells are administered over about 11 days. In some embodiments, the doses of NK cells are administered over about 12 days. In some embodiments, the doses of NK cells are administered over about 13 days. In some embodiments, the doses of NK cells are administered over about 14 days.

[0565] In some embodiments, each dose of NK cells is administered between about 5-10 days apart. In some embodiments, a second dose of NK cells is administered about 5-10 days after administration of the first dose. In some embodiments, a third dose of NK cells is administered about 5-10 days after administration of the second dose. In some embodiments, a second dose of NK cells is administered about 5-10 days after administration of the first dose, and a third dose of NK cells is administered about 5-10 days after administration of the second dose. In some embodiments, a second dose of NK cells is administered about 7 days after administration of the first dose. In some embodiments, a third dose of NK cells is administered about 7 days after administration of the second dose. In some embodiments, a second dose of NK cells is administered about 7 days after administration of the first dose, and a third dose of NK cells is administered about 7 days after administration of the second dose. In several embodiments, a dosing cycle comprises administration of three doses of NK cells, wherein the second dose is administered about 5-10 (e.g., 7) days after administration of the first dose, the third dose is administered about 5-10 (e.g., 7) days after administration of the second dose.

[0566] In several embodiments, dosing is, for example, 3 doses of about 1.0×10⁸ NK cells or about 3×10⁹ NK cells administered over about 14 days. In several embodiments, dosing is, for example, 3 doses of about 1.0×10⁸ NK cells or about 3×10⁹ NK cells administered over about 21 to 28 days. In several embodiments, dosing is, for example, 3 doses of about 1.0×10⁹ NK cells or about 1.5×10⁹ NK cells administered over about 14 days. In several embodiments, dosing is, for example, 3 doses of about 1.0×10⁹ NK cells or about 1.5×10⁹ NK cells administered over about 21 to 28 days. In several embodiments, a dosing cycle comprises 3 doses of about 3×10⁸ NK cells administered over about 14 days. In several embodiments, a dosing cycle comprises 3 doses of about 3×10⁸ NK cells administered over about 21 days. In several embodiments, a dosing cycle comprises 3 doses of about 3×10⁸ NK cells administered over about 28 days. In several embodiments, a dosing cycle comprises 3 doses of about 1.0×10⁹ NK cells administered over about 14 days. In several embodiments, a dosing cycle comprises 3 doses of about 1.0×10⁹ NK cells administered over about 21 days. In several embodiments, a dosing cycle comprises 3 doses of about 1.0×10⁹ NK cells administered over about 28 days. In several embodiments, a dosing cycle comprises 3 doses of about 1.5×10⁹ NK cells administered over about 14 days. In several embodiments, a dosing cycle comprises 3 doses of about 1.5×10⁹ NK cells administered over about 21 days. In several embodiments, a dosing cycle comprises 3 doses of about 1.5×10⁹ NK cells administered over about 28 days. In several embodiments, a dosing cycle comprises 3 doses of about 2×10⁹ NK cells administered over about 14 days. In several embodiments, a dosing cycle comprises 3 doses of about 2×10⁹ NK cells administered over about 21 days. In several embodiments, a dosing cycle comprises 3 doses of about 2×10⁹ NK cells administered over about 28 days. In several embodiments, a dosing cycle comprises 3 doses of about 2.5×10⁹ NK cells administered over about 14 days. In several embodiments, a dosing cycle comprises 3 doses of about 2.5×10⁹ NK cells administered over about 21 days. In several embodiments, a dosing cycle comprises 3 doses of about 2.5×10⁹ NK cells administered over about 28 days. In several embodiments, a dosing cycle comprises 3 doses of about 3×10⁹ NK cells administered over about 14 days. In several embodiments, a dosing cycle comprises 3 doses of about 3×10⁹ NK cells administered over about 21 days. In several embodiments, a dosing cycle comprises 3 doses of about 3×10⁹ NK cells administered over about 28 days. In some embodiments, the NK cells are chimeric receptor-expressing NK cells.

[0567] In some embodiments, each dose of NK cells is administered between about 2-4 days apart. In some embodiments, a second dose of NK cells is administered about 2-4 days after administration of the first dose. In some embodiments, a third dose of NK cells is administered about 2-4 days after administration of the second dose. In some embodiments, a second dose of NK cells is administered about 2-4 days after administration of the first dose, and a third dose of NK cells is administered about 2-4 days after administration of the second dose. In some embodiments, a second dose of NK cells is administered about 3 days after administration of the first dose. In some embodiments, a third dose of NK cells is administered about 4 days after administration of the second dose. In some embodiments, a second dose of NK cells is administered about 3 days after administration of the first dose, and a third dose of NK cells is administered about 4 days after administration of the second dose. In several embodiments, a dosing cycle comprises administration of three doses of NK cells, wherein the second dose is administered about 2-4 (e.g., 3) days after administration of the first dose, the third dose is administered about 2-4 (e.g., 4) days after administration of the second dose.

[0568] In several embodiments, the administration of engineered NK cells is preceded by one or more preparatory treatments. In several embodiments, the administration of engineered NK cells is preceded by lymphodepletion. In several embodiments, each dosing cycle is preceded by lymphodepletion. In several embodiments, a lymphodepletion process is performed prior to the first dose. In several embodiments, a combination of chemotherapeutic agents is used for lymphodepletion. In several embodiments, a single chemotherapeutic agent is used for lymphodepletion. In several embodiments, wherein a combination of chemotherapeutic agents is used, agents with different mechanisms of actions are optionally used. In several embodiments, different classes of agents are optionally used. In several embodiments, an antimetabolic agent is used. In several embodiments, the antimetabolic agent inhibits and/or prevents cell replication.

[0569] In several embodiments, cyclophosphamide, an alkylating agent that reduces tumor growth, is used in lymphodepletion. In several embodiments, the lymphodepletion comprises cyclophosphamide. In several embodiments, a dose of between about 200 and 1000 mg/m² cyclophosphamide is administered, including doses of about 200 mg/m², about 225 mg/m², about 250 mg/m², about 275 mg/m², about 300 mg/m², about 325 mg/m², about 350 mg/m², about 400 mg/m², about 450 mg/m², about 475 mg/m², about 500 mg/m², about 525 mg/m², about 550 mg/m², about 600 mg/m², about 700 mg/m², about 800 mg/m², about 900 mg/m², about 1000 mg/m², or any dose between those listed. In several embodiments, a dose of about 300 mg/m² cyclophosphamide is administered. In several embodiments, a dose of about 500 mg/m² cyclophosphamide is administered. In several embodiments, the dose of cyclophosphamide is given daily for days (e.g., prior to chimeric receptor-expressing NK administration). In several embodiments, the dose of cyclophosphamide is given daily for at least about 2 days, about 3 days, about 4 days, about 5 days, about 6 days, or about 7 days (e.g., prior to chimeric receptor-expressing NK administration). In several embodiments, the cyclophosphamide is given daily for 3 days. In several embodiments, if necessary, the dose can be split and given, for example, twice daily. In several embodiments, the cyclophosphamide is given daily for 3 days, starting 5 days prior to the first administration of a chimeric receptor-expressing immune cell. In several embodiments, the cyclophosphamide is given at a dose of about 300 mg/m² daily for 3 days, starting 5 days prior to the first administration of a chimeric receptor-expressing immune cell. In several embodiments, the cyclophosphamide is given at a dose of about 500 mg/m² daily for 3 days, starting 5 days prior to the first administration of chimeric receptor-expressing immune cells. In several embodiments, a dose (e.g., a single dose) of about 1000 mg/m² cyclophosphamide is administered. In several embodiments, a single dose of cyclophosphamide is administered about 5 days, about 4 days, about 3 days, or about 2 days prior to the first administration of chimeric receptor-expressing immune cells. In several embodiments, a single dose of cyclophosphamide is administered about 3 days prior to the first administration of chimeric receptor-expressing immune cells. In several embodiments, cyclophosphamide is administered in combination with another lymphodepleting agent.

[0570] In several embodiments, the additional lymphodepleting agent is also an antimetabolite. In several embodiments, the additional agent inhibits one or more of DNA polymerase alpha, ribonucleotide reductase and/or DNA primase, thus inhibiting DNA synthesis. In several embodiments, the additional agent is fludarabine. In several embodiments, a dose of between about 5.0 mg/m²-about 200 mg/m² fludarabine is administered, including doses of about 5.0 mg/m², about 10.0 mg/m², about 15.0 mg/m², about 20.0 mg/m², about 25.0 mg/m², about 30.0 mg/m², about 35.0 mg/m², about 40.0 mg/m², about 45.0 mg/m², about 50.0 mg/m², about 60.0 mg/m², about 70.0 mg/m², about 80.0 mg/m², about 90.0 mg/m², about 100.0 mg/m², about 125.0 mg/m², about 150.0 mg/m², about 175.0 mg/m², about 200.0 mg/m², or any dose between those listed. In several embodiments, a dose of about 30 mg/m² fludarabine is administered. In several embodiments, the dose of fludarabine is given daily for at least about 2 days, about 3 days, about 4 days, about 5 days, about 6 days, or about 7 days. In several embodiments, the dose of fludarabine is given daily for about 3 days. In several embodiments, about 30 mg/m² fludarabine is given daily for about 3 days. In several embodiments, about 30 mg/m² fludarabine is given daily for about 5 days. In several embodiments, if necessary, the dose can be split and given, for example, twice daily.

[0571] In several embodiments, about 300 mg/m² cyclophosphamide and about 30 mg/m² fludarabine is each given daily for about 3 days. In several embodiments, prior to each dosing cycle, about 300 mg/m² cyclophosphamide and about 30 mg/m² fludarabine is each given daily for about 3 days. In several embodiments, about 500 mg/m² cyclophosphamide and about 30 mg/m² fludarabine is each given daily for about 3 days. In several embodiments, prior to each dosing cycle, about 500 mg/m² cyclophosphamide and about 30 mg/m² fludarabine is each given daily for about 3 days. In several embodiments, prior to each dosing cycle, about 1000 mg/m² cyclophosphamide is given once.

[0572] In several embodiments, an additional therapeutic agent is administered at least once during the lymphodepletion and/or the dosing cycle. In several embodiments, an additional therapeutic agent is administered at least once during the lymphodepletion. In several embodiments, an additional therapeutic agent is administered at least once during the dosing cycle. For example, in several embodiments, cyclophosphamide, cytosine arabinoside (Ara-C), an anti-CD20 antibody (a non-limiting embodiment of which is rituximab), and/or an anti-EGFR antibody (a non-limiting embodiment of which is cetuximab) is administered in connection with treatment. In several embodiments, cyclosphosphamide is administered in connection with the treatment. In several embodiments, cytosine arabinoside is administered in connection with the treatment. In several embodiments, an anti-CD20 antibody (e.g., rituximab) is administered in connection with the treatment. In several embodiments, an anti-EGFR antibody (e.g., cetuximab) is administered in connection with the treatment.

[0573] Depending on the embodiment, various types of cancer can be treated. In several embodiments, hepatocellular carcinoma is treated. Additional embodiments provided for herein include treatment or prevention of the following non-limiting examples of cancers including, but not limited to, acute lymphoblastic leukemia (ALL), acute myeloid leukemia (AML), adrenocortical carcinoma, Kaposi sarcoma, lymphoma, gastrointestinal cancer, appendix cancer, central nervous system cancer, basal cell carcinoma, bile duct cancer, bladder cancer, bone cancer, brain tumors (including but not limited to astrocytomas, spinal cord tumors, brain stem glioma, glioblastoma, craniopharyngioma, ependymoblastoma, ependymoma, medulloblastoma, medulloepithelioma), breast cancer, bronchial tumors, Burkitt lymphoma, cervical cancer, colon cancer, chronic lymphocytic leukemia (CLL), chronic myelogenous leukemia (CML), chronic myeloproliferative disorders, ductal carcinoma, endometrial cancer, esophageal cancer, gastric cancer, Hodgkin lymphoma, non-Hodgkin lymphoma, hairy cell leukemia, renal cell cancer, leukemia, oral cancer, nasopharyngeal cancer, liver cancer, lung cancer (including but not limited to, non-small cell lung cancer, (NSCLC) and small cell lung cancer), pancreatic cancer, bowel cancer, lymphoma, melanoma, ocular cancer, ovarian cancer, pancreatic cancer, prostate cancer, pituitary cancer, uterine cancer, and vaginal cancer.

[0574] In some embodiments, also provided herein are nucleic acid and amino acid sequences that have sequence identity and/or homology of at least 80%, 85%, 90%, 95%, 96%, 97%, 98%, 99% (and ranges therein) as compared with the respective nucleic acid or amino acid sequences of SEQ ID NOS. 1-976 (or combinations of two or more of SEQ ID NOS: 1-976) and that also exhibit one or more of the functions as compared with the respective SEQ ID NOS. 1-976 (or combinations of two or more of SEQ ID NOS: 1-976) including but not limited to, (i) enhanced proliferation, (ii) enhanced activation, (iii) enhanced cytotoxic activity against cells presenting ligands to which NK cells harboring receptors encoded by the nucleic acid and amino acid sequences bind, (iv) enhanced homing to tumor or infected sites, (v) reduced off target cytotoxic effects, (vi) enhanced secretion of immunostimulatory cytokines and chemokines (including, but not limited to IFNg, TNFa, IL-22, CCL3, CCL4, and CCL5), (vii) enhanced ability to stimulate further innate and adaptive immune responses, and (viii) combinations thereof. In some embodiments, also provided herein are nucleic acid and amino acid sequences that have sequence identity and/or homology of at least 80%, 85%, 90%, 95%, 96%, 97%, 98%, 99% (and ranges therein) as compared with the respective nucleic acid or amino acid sequences of SEQ ID NOS. 1-1011 (or combinations of two or more of SEQ ID NOS: 1-1011) and that also exhibit one or more of the functions as compared with the respective SEQ ID NOS. 1-1011 (or combinations of two or more of SEQ ID NOS: 1-1011) including but not limited to, (i) enhanced proliferation, (ii) enhanced activation, (iii) enhanced cytotoxic activity against cells presenting ligands to which NK cells harboring receptors encoded by the nucleic acid and amino acid sequences bind, (iv) enhanced homing to tumor or infected sites, (v) reduced off target cytotoxic effects, (vi) enhanced secretion of immunostimulatory cytokines and chemokines (including, but not limited to IFNg, TNFa, IL-22, CCL3, CCL4, and CCL5), (vii) enhanced ability to stimulate further innate and adaptive immune responses, and (viii) combinations thereof. In some embodiments, also provided herein are nucleic acid and amino acid sequences that have sequence identity and/or homology of at least 80%, 85%, 90%, 95%, 96%, 97%, 98%, 99% (and ranges therein) as compared with the respective nucleic acid or amino acid sequences of SEQ ID NOS. 1-1089 (or combinations of two or more of SEQ ID NOS: 1-1089) and that also exhibit one or more of the functions as compared with the respective SEQ ID NOS. 1-1089 (or combinations of two or more of SEQ ID NOS: 1-1089) including but not limited to, (i) enhanced proliferation, (ii) enhanced activation, (iii) enhanced cytotoxic activity against cells presenting ligands to which NK cells harboring receptors encoded by the nucleic acid and amino acid sequences bind, (iv) enhanced homing to tumor or infected sites, (v) reduced off target cytotoxic effects, (vi) enhanced secretion of immunostimulatory cytokines and chemokines (including, but not limited to IFNg, TNFa, IL-22, CCL3, CCL4, and CCL5), and (vii) enhanced ability to stimulate further innate and adaptive immune responses, and (viii) combinations thereof.

[0575] In Advantageously, in several embodiments, the therapies and dosing regimens provided for herein provide effective anti-cancer treatment without certain CAR-T cell toxicities, such as cytokine release syndrome, immune effector cell-associated neurotoxicity syndrome (ICANS) or neurotoxicity, or graft-versus host disease (GVHD). In several embodiments, complete remission is achieved. In several embodiments, complete response (CR) is achieved. In several embodiments, partial response (PR) is achieved. In several embodiments, stable disease (SD) or limited progression of disease is accomplished.

[0576] Additionally, in several embodiments, there are provided amino acid sequences that correspond to any of the nucleic acids disclosed herein, while accounting for degeneracy of the nucleic acid code. Furthermore, those sequences (whether nucleic acid or amino acid) that vary from those expressly disclosed herein, but have functional similarity or equivalency are also contemplated within the scope of the present disclosure. The foregoing includes mutants, truncations, substitutions, or other types of modifications.

[0577] In several embodiments, polynucleotides encoding the disclosed cytotoxic receptor complexes are mRNA. In some embodiments, the polynucleotide is DNA. In some embodiments, the polynucleotide is operably linked to at least one regulatory element for the expression of the cytotoxic receptor complex.

[0578] Additionally provided, according to several embodiments, is a vector comprising the polynucleotide encoding any of the polynucleotides provided for herein, wherein the polynucleotides are optionally operatively linked to at least one regulatory element for expression of a cytotoxic receptor complex. In several embodiments, the vector is a viral vector. In several embodiments, the vector is a retrovirus.

[0579] Further provided herein are engineered immune cells (such as NK and/or T cells) comprising the polynucleotide, vector, or cytotoxic receptor complexes as disclosed herein. Further provided herein are compositions comprising a mixture of engineered immune cells (such as NK cells and/or engineered T cells), each population comprising the polynucleotide, vector, or cytotoxic receptor complexes as disclosed herein. Additionally, there are provided herein compositions comprising a mixture of engineered immune cells (such as NK cells and/or engineered T cells), each population comprising the polynucleotide, vector, or cytotoxic receptor complexes as disclosed herein and the T cell population having been genetically modified to reduce/eliminate GvHD and/or HvGD. In some embodiments, the NK cells and the T cells are from the same donor. In some embodiments, the NK cells and the T cells are from different donors.

[0580] Doses of immune cells such as NK cells or T cells can be readily determined for a given subject based on their body mass, disease type and state, and desired aggressiveness of treatment, but range, depending on the embodiments, from about 10⁵ cells per kg to about 10¹² cells per kg (e.g., 105-10⁷, 10⁷ 10¹⁰, 10¹⁰-10¹² and overlapping ranges therein). In one embodiment, a dose escalation regimen is used. In some embodiments, a dose of immune cells comprises NK cells. In some embodiments, a dose of immune cells comprises T cells. In some embodiments, a dose of immune cells comprises NK cells and T cells. In several embodiments, a range of NK cells is administered, for example between about 1×10⁶ cells/kg to about 1×10⁸ cells/kg. In several embodiments, dosing is, for example, 3 doses of about 1.0×10⁹ NK cells or about 1.5×10⁹ NK cells administered over about 21 to 28 days. In several embodiments, a range of T cells is administered, for example between about 1×10⁶ cells/kg to about 1×10⁸ cells/kg.

[0581] For the prevention or treatment of cancer, the appropriate dosage may depend on the type of cancer to be treated, the type of cells or recombinant receptors, the severity and course of the cancer, whether the cells are administered for preventive or therapeutic purposes, previous therapy, the subject's clinical history and response to the cells, and the discretion of the attending physician. The compositions and cells are in some embodiments suitably administered to the subject at one time or over a series of treatments.

[0582] In some embodiments, the engineered immune cells are administered as part of a combination treatment, such as simultaneously with or sequentially with, in any order, another or additional therapeutic intervention, such as an antibody or engineered cell or receptor or agent, such as a cytotoxic or therapeutic agent. The engineered immune cells in some embodiments are co-administered with one or more additional therapeutic agents or in connection with another therapeutic intervention, either simultaneously or sequentially in any order. In some embodiments, the additional therapeutic agent is any interventions or agents described herein, such as any interventions or agents descried that can ameliorate symptoms of toxicity. In some contexts, the engineered immune cells are co-administered with another therapy sufficiently close in time such that the engineered immune cell populations enhance the effect of one or more additional therapeutic agents, or vice versa. In some embodiments, the engineered immune cells are administered prior to the one or more additional therapeutic agents. In some embodiments, the engineered immune cells are administered after the one or more additional therapeutic agents. In some embodiments, the one or more additional agents include a cytokine, such as IL-2, for example, to enhance persistence. In some embodiments, the methods comprise administration of a chemotherapeutic agent. In some embodiments, the methods comprise administration of a chemotherapeutic agent, e.g., a conditioning chemotherapeutic agent, for example, to reduce tumor burden prior to the administration, including as described in the subsequent section.

[0583] The dose of the additional agent can be any therapeutically effective amount, e.g., any dose amount described herein, and the appropriate dosage of the additional agent may depend on the type of disease to be treated, the type, dose and/or frequency of the binding molecule, recombinant receptor, cell and/or composition administered, the severity and course of the disease, previous therapy, the patient's clinical history and response to cell therapy, and the discretion of the attending physician.

[0584] In several embodiments, one or more of cyclophosphamide, cytosine arabinoside, an anti-CD20 antibody (a non-limiting embodiment of which is rituximab), and/or an anti-EGFR antibody (a non-limiting embodiment of which is cetuximab) is administered on connection with treatment. Depending on the embodiment, various types of cancer or infection disease can be treated.

### Compositions and Formulations

[0585] Provided herein are compositions and formulations comprising a population of immune cells (e.g., NK cells) as described herein. In some embodiments, a cell dose comprising a population of immune cells (e.g., NK cells expressing a chimeric receptor such as a CAR) is provided as a composition or formulation, such as a pharmaceutical composition or formulation. Such compositions can be used in accordance with and/or with provided articles or compositions, such as for the prevention or treatment of diseases, conditions, and disorders, or in detection, diagnosis, and prognosis methods.

[0586] The term “pharmaceutical formulation” refers to a formulation in a form that allows the biological activity of the active ingredient contained therein to be effective and that is free of additional components having unacceptable toxicity to the subject to which the formulation will be applied.

[0587] By “pharmaceutically acceptable carrier” is meant an ingredient of a pharmaceutical formulation that is non-toxic to a subject, except for the active ingredient. Pharmaceutically acceptable carriers include, but are not limited to, buffers, excipients, stabilizers, or preservatives.

[0588] In some aspects, the choice of carrier depends in part on the particular cell or agent and/or the method of administration. Thus, there are a variety of suitable formulations. For example, the pharmaceutical composition may contain a preservative. Suitable preservatives may include, for example, methyl paraben, propyl paraben, sodium benzoate and benzalkonium chloride. In some aspects, a mixture of two or more preservatives is used. Preservatives or mixtures thereof are typically present in amounts of about 0.0001% to about 2% by weight of the total composition Pharmaceutically acceptable carriers are generally non-toxic to recipients at the dosages and concentrations used, and include, but are not limited to: buffers such as phosphate, citrate and other organic acids; antioxidants, including ascorbic acid and methionine; preservatives (such as octadecyl dimethyl benzyl ammonium chloride; hexamethonium chloride; benzalkonium chloride; benzethonium chloride; phenol, butanol or benzyl alcohol; alkyl parabens, such as methyl or propyl paraben, catechol; resorcinol; cyclohexanol; 3-pentanol; and m-cresol); low molecular weight (less than about 10 residues) polypeptides; proteins, such as serum albumin, gelatin or immunoglobulins; hydrophilic polymers such as polyvinylpyrrolidone; amino acids such as glycine, glutamine, asparagine, histidine, arginine or lysine; monosaccharides, disaccharides, and other carbohydrates including glucose, mannose, or dextrins; chelating agents, such as EDTA; sugars such as sucrose, mannitol, trehalose or sorbitol; salt-forming counterions, such as sodium; metal complexes (e.g., zinc-protein complexes); and/or a non-ionic surfactant, such as polyethylene glycol (PEG).

[0589] In some aspects, a buffer is included in the composition. Suitable buffering agents include, for example, citric acid, sodium citrate, phosphoric acid, potassium phosphate, and various other acids and salts. In some aspects, a mixture of two or more buffers is used. The buffering agent or mixtures thereof are typically present in an amount of from about 0.001% to about 4% by weight of the total composition. Methods for preparing administrable pharmaceutical compositions are known.

[0590] The formulation or composition may also contain more than one active ingredient that may be used for a particular indication, disease or condition that is prevented or treated with the cell or agent, where the respective activities do not adversely affect each other. Such active ingredients are present in combination in an amount effective for the intended purpose in a suitable manner. Thus, in some embodiments, the pharmaceutical composition further comprises other pharmaceutically active agents or drugs, such as chemotherapeutic agents, e.g., asparaginase, busulfan, carboplatin, cetuximab, cisplatin, daunomycin, doxorubicin, fluorouracil, gemcitabine, hydroxyurea, methotrexate, paclitaxel, rituximab, vinblastine, vincristine, and the like. In some embodiments, the agent or cell is administered in the form of a salt (e.g., a pharmaceutically acceptable salt). Suitable pharmaceutically acceptable acid addition salts include those derived from inorganic acids (such as hydrochloric, hydrobromic, phosphoric, metaphosphoric, nitric and sulfuric) and organic acids (such as tartaric, acetic, citric, malic, lactic, fumaric, benzoic, glycolic, gluconic, succinic and arylsulfonic, e.g., p-toluenesulfonic acid).

[0591] In some embodiments, the pharmaceutical composition contains the agent or cell in an amount effective to treat or prevent the disease or condition (e.g., a therapeutically effective amount or a prophylactically effective amount). In some embodiments, treatment or prevention efficacy is monitored by periodic assessment of the treated subject. For repeated administrations over several days or longer, depending on the condition, the treatment is repeated until the desired suppression of disease symptoms occurs. However, other dosage regimens may be useful and may be determined. The desired dose may be delivered by administering the composition as a single bolus, by administering the composition as multiple boluses, or by administering the composition as a continuous infusion.

[0592] Formulations include those for oral, intravenous, intraperitoneal, subcutaneous, pulmonary, transdermal, intramuscular, intranasal, buccal, sublingual, or suppository administration. In some embodiments, the agent or cell population is administered to the subject by intravenous, intraperitoneal, or subcutaneous injection using peripheral systemic delivery.

[0593] In some embodiments, the compositions are provided as sterile liquid formulations (e.g., isotonic aqueous solutions, suspensions, emulsions, dispersions, or viscous compositions), which in some aspects may be buffered to a selected pH. Liquid formulations are generally easier to prepare than gels, other viscous compositions, and solid compositions. In addition, liquid compositions are somewhat more convenient to administer, particularly by injection. The liquid composition can comprise a carrier, which can be a solvent or dispersion medium containing, for example, water, saline, phosphate buffered saline, polyols (e.g., glycerol, propylene glycol, liquid polyethylene glycol), and suitable mixtures thereof.

[0594] Sterile injectable solutions can be prepared by incorporating the agent or cell into a solvent, such as an admixture with a suitable carrier, diluent, or excipient (e.g., sterile water, saline, glucose, dextrose, and the like).

[0595] Formulations for in vivo administration are typically sterile. Sterility can be readily achieved, for example, by filtration through sterile filtration membranes. In some embodiments, the dose of engineered cells administered is in a cryopreserved composition. In some aspects, the composition is administered after thawing the cryopreserved composition

### Articles and Kits

[0596] Also provided are articles of manufacture and kits comprising (i) any of the compositions described herein; and (ii) instructions for administering the composition to a subject.

[0597] In some embodiments, an article of manufacture or kit comprises one or more containers (typically a plurality of containers), packaging material, and a label or package insert located on or associated with the one or more containers and/or packages, the label or package insert typically comprising instructions for performing any of the methods provided herein, e.g., for administering a population of immune cells to a subject. In some embodiments, the instructions provide guidance or assignment methods for assessing whether a subject is likely or suspected to be likely to respond prior to receiving the engineered immune and/or the extent or level of response after administration of the population of immune cells. In some aspects, the article of manufacture may contain a dose or composition of immune cells.

[0598] The articles provided herein contain packaging materials. Packaging materials for packaging provided materials are well known to those skilled in the art. Examples of packaging materials include, but are not limited to, blister packs, bottles, tubes, inhalers, pumps, bags, vials, containers, syringes, disposable laboratory items (e.g., pipette tips and/or plastic sheets), or bottles. The article or kit may include means to facilitate dispensing of materials or to facilitate use in a high throughput or large-scale manner, for example to facilitate use in a robotic device. Typically, the package does not react with the composition contained therein.

[0599] In some embodiments, the reagents and/or cell compositions are packaged separately. In some embodiments, each vessel may have a single compartment. In some embodiments, the other components of the article of manufacture or kit are packaged separately, or together in a single compartment.

### Definitions

[0600] The terms described below, or elsewhere herein, shall be understood to have their ordinary meaning and shall also be understood to have the meanings specifically described herein, unless otherwise specifically indicated.

[0601] The terms “polypeptide” and “protein” are used interchangeably to refer to a polymer of amino acid residues, and are not limited to a minimum length. Polypeptides, including the provided receptors and other polypeptides, e.g., linkers or peptides, may include amino acid residues including natural and/or non-natural amino acid residues. The terms also include post-expression modifications of the polypeptide, for example, glycosylation, sialylation, acetylation, and phosphorylation. In some aspects, the polypeptides may contain modifications with respect to a native or natural sequence, as long as the protein maintains the desired activity. These modifications may be deliberate, as through site-directed mutagenesis, or may be accidental, such as through mutations of hosts which produce the proteins or errors due to PCR amplification.

[0602] As used herein, a “subject” is a mammal, such as a human or other animal, and typically is human. In some embodiments, the subject, e.g., patient, to whom the agent or agents, cells, cell populations, or compositions are administered, is a mammal, typically a primate, such as a human. In some embodiments, the primate is a monkey or an ape. The subject can be male or female and can be any suitable age, including infant, juvenile, adolescent, adult, and geriatric subjects. In some embodiments, the subject is a non-primate mammal, such as a rodent.

[0603] As used herein, “treatment” (and grammatical variations thereof such as “treat” or “treating”) refers to complete or partial amelioration or reduction of a disease or condition or disorder, or a symptom, adverse effect or outcome, or phenotype associated therewith. Desirable effects of treatment include, but are not limited to, alleviation of symptoms, diminishment of any direct or indirect pathological consequences of the disease, preventing metastasis, decreasing the rate of disease progression, amelioration or palliation of the disease state, and remission or improved prognosis. The terms do not imply complete curing of a disease or complete elimination of any symptom or effect(s) on all symptoms or outcomes.

[0604] “Preventing” (and grammatical variations thereof such as “prevent” or “prevention”) as used herein, includes providing prophylaxis with respect to the occurrence or recurrence of a disease in a subject that may be predisposed to the disease but has not yet been diagnosed with the disease. In some embodiments, the provided cells and compositions are used to delay development of a disease or to slow the progression of a disease.

[0605] A “therapeutically effective amount” of an agent, e.g., a pharmaceutical formulation or cells, refers to an amount effective, at dosages and for periods of time necessary, to achieve a desired therapeutic result, such as for treatment of a disease, condition, or disorder, and/or pharmacokinetic or pharmacodynamic effect of the treatment. The therapeutically effective amount may vary according to factors such as the disease state, age, sex, and weight of the subject, and the populations of cells administered. In some embodiments, the provided methods involve administering the cells and/or compositions at effective amounts, e.g., therapeutically effective amounts.

[0606] As used herein, the singular forms “a,” “an,” and “the” include plural referents unless the context clearly dictates otherwise. For example, “a” or “an” means “at least one” or “one or more.

[0607] Throughout this disclosure, various aspects of the claimed subject matter are presented in a range format. It should be understood that the description in range format is merely for convenience and brevity and should not be construed as an inflexible limitation on the scope of the claimed subject matter. Accordingly, the description of a range should be considered to have specifically disclosed all the possible sub-ranges as well as individual numerical values within that range. Language such as “up to,” “at least,” “greater than,” “less than,” “between,” and the like includes the number recited. Numbers preceded by a term such as “about” or “approximately” include the recited numbers. For example, where a range of values is provided, it is understood that each intervening value, between the upper and lower limit of that range and any other stated or intervening value in that stated range is encompassed within the claimed subject matter. The upper and lower limits of these smaller ranges may independently be included in the smaller ranges, and are also encompassed within the claimed subject matter, subject to any specifically excluded limit in the stated range. Where the stated range includes one or both of the limits, ranges excluding either or both of those included limits are also included in the claimed subject matter. This applies regardless of the breadth of the range.

[0608] The term “about” as used herein refers to the usual error range for the corresponding value that is readily known. Reference herein to “about” a value or parameter includes (and describes) embodiments that relate to that value or parameter per se. For example, a description referring to “about X” includes a description of “X”. In certain embodiments, “about X” refers to a value of ±25%, ±10%, ±5%, ±2%, ±1%, ±0.1% or ±0.01% of X.

[0609] In addition, when a sequence is disclosed as “comprising” a nucleotide or amino acid sequence, such a reference shall also include, unless otherwise indicated, that the sequence “comprises”, “consists of” or “consists essentially of” the recited sequence.

[0610] As used herein, a statement that a cell or population of cells is “positive” for a particular marker refers to the detectable presence of the particular marker (typically a surface marker) on or in the cell. When referring to a surface marker, the term refers to the presence of surface expression as detected by flow cytometry, for example by staining with an antibody that specifically binds to the marker and detecting the antibody, wherein the staining is detectable by flow cytometry at a level that is substantially higher than the staining detected by the same procedure with an isotype matched control under otherwise identical conditions, and/or that is substantially similar to the level of cells known to be positive for the marker, and/or that is substantially higher than the level of cells known to be negative for the marker.

[0611] As used herein, a statement that a cell or cell population is “negative” for a particular marker means that the particular marker (typically a surface marker) is not present on or in the cell in a substantially detectable presence. When referring to a surface marker, the term refers to the absence of surface expression as detected by flow cytometry, for example by staining with an antibody that specifically binds to the marker and detecting the antibody, wherein the staining is not detected by flow cytometry at a level that is substantially higher than the staining detected by the same procedure with an isotype matched control under otherwise identical conditions, and/or at a level that is substantially lower than the level of cells known to be positive for the marker, and/or at a level that is substantially similar compared to the level of cells known to be negative for the marker.

[0612] As used herein, “percent” (%) amino acid sequence identity” and “percent identity,” when used in reference to an amino acid sequence (a reference polypeptide sequence), is defined as the percentage of amino acid residues in a candidate sequence (e.g., a subject antibody or fragment) that are identical to the amino acid residues in the reference polypeptide sequence, after aligning the sequences and introducing gaps, if necessary, to achieve the maximum percent sequence identity, and without considering any conservative substitutions as part of the sequence identity. Alignment for the purpose of determining percent amino acid sequence identity can be accomplished in a variety of known ways, for example, using publicly available computer software. Appropriate parameters for aligning the sequences can be determined, including any algorithms necessary to achieve maximum alignment over the full length of the sequences being compared.

[0613] Amino acid substitutions can include the substitution of one amino acid for another in a polypeptide. Substitutions may be conservative amino acid substitutions or non-conservative amino acid substitutions. Amino acid substitutions may be introduced into the binding molecule of interest (e.g., an antibody) and the product screened for the desired activity (e.g., retained/improved antigen binding, reduced immunogenicity, or improved ADCC or CDC).

[0614] Amino acids can be generally grouped according to the following common side chain properties.

[0615] In some embodiments, conservative substitutions may include exchanging a member of one of these classes for another member of the same class. In some embodiments, a non-conservative amino acid substitution may involve exchanging a member of one of these classes for another class.
[0616] (1) hydrophobicity: Norleucine, Met, Ala, Val, Leu, Ile;
[0617] (2) neutral hydrophilicity: Cys, Ser, Thr, Asn, Gln;
[0618] (3) acidity: Asp and Glu;
[0619] (4) alkalinity: His, Lys, Arg;
[0620] (5) residues that influence chain orientation: Gly, Pro;
[0621] (6) aromatic: Trp, Tyr, Phe.

[0622] As used herein, a composition refers to any mixture of two or more products, substances, or compounds, including cells. It may be a solution, a suspension, liquid, powder, a paste, aqueous, non-aqueous or any combination thereof.

### Non-Limiting Embodiments

[0623] Among the embodiments provided herein are:
[0624] 1. A population of genetically engineered and gene edited immune cells, comprising genetically engineered immune cells that express a cytotoxic receptor comprising an extracellular ligand binding domain, a transmembrane domain, and a cytotoxic signaling complex, wherein:
[0625] the extracellular ligand binding domain targets an antigen expressed by cells of a target tumor or cancer;
[0626] the immune cells are genetically edited within a target sequence in a MED12 gene comprising any one of SEQ ID NOS: 938-944 or 996-998;
[0627] the edit yields reduced expression and/or function of the MED12 protein encoded by the MED12 gene, as compared to an immune cell not edited within the target sequence in the MED12 gene; and
[0628] the edit to the MED12 gene is made using an RNA-guided endonuclease.
[0629] 2. A population of genetically engineered and gene edited immune cells, comprising genetically engineered immune cells that express a cytotoxic receptor comprising an extracellular ligand binding domain, a transmembrane domain, and a cytotoxic signaling complex, wherein:
[0630] the immune cells are natural killer (NK) cells;
[0631] the extracellular ligand binding domain targets an antigen expressed by cells of a target tumor or cancer;
[0632] the immune cells are genetically edited within a target sequence in a MED12 gene comprising any one of SEQ ID NOS: 938-944 or 996-998;
[0633] the edit yields reduced expression and/or function of the MED12 protein encoded by the MED12 gene, as compared to an immune cell not edited within the target sequence in the MED12 gene; and
[0634] the edit to the MED12 gene is made using an RNA-guided endonuclease.
[0635] 3. A population of genetically engineered and gene edited immune cells, comprising genetically engineered immune cells that express a cytotoxic receptor comprising an extracellular ligand binding domain, a transmembrane domain, and a cytotoxic signaling complex, wherein:
[0636] the extracellular ligand binding domain targets an antigen expressed by cells of a target tumor or cancer;
[0637] the immune cells are genetically edited within a target sequence in a MED12 gene and within a target sequence in a CISH gene;
[0638] the edits yield reduced expression and/or function of each of the MED12 protein encoded by the MED12 gene and the CIS protein encoded by the CISH gene, as compared to an immune cell not edited within the target sequence in the MED12 gene and the target sequence within the CISH gene.
[0639] 4. The population of genetically engineered and gene edited immune cells of Embodiment 3, wherein the edits to the MED12 and CISH genes are made using an RNA-guided endonuclease.
[0640] 5. The population of genetically engineered and gene edited immune cells of any one of Embodiments 1, 3, and Embodiment 4, wherein the immune cells are natural killer (NK) cells.
[0641] 6. A population of genetically engineered and gene edited immune cells, comprising:
[0642] genetically engineered immune cells that express a cytotoxic receptor comprising an extracellular ligand binding domain, a transmembrane domain, and a cytotoxic signaling complex,
[0643] wherein the extracellular ligand binding domain targets a tumor marker expressed by a target tumor cell,
[0644] wherein the immune cells are genetically edited at one or more locations in an ADAM17 target gene that encodes a corresponding protein,
[0645] wherein the edits yield reduced expression and/or function of a corresponding ADAM17 protein as compared to an immune cell not edited at the location or locations in the ADAM17 gene;
[0646] wherein the immune cells are optionally edited at one or more additional target sites in the genome of the immune cell to yield reduced levels of expression of the protein which is encoded by a gene which comprises an edited target site as compared to a non-edited immune cell,
[0647] wherein the edits to the target gene or target genes are made using an RNA-guided endonuclease, and
[0648] wherein the genetically engineered and edited immune cells exhibit one or more of enhanced expansion capability, enhanced cytotoxicity against target tumor cells, and enhanced persistence, as compared to immune cells that do not comprise said genetically edited target site or sites.
[0649] 7. A population of genetically engineered and gene edited immune cells, comprising:
[0650] genetically engineered immune cells that express a cytotoxic receptor comprising an extracellular ligand binding domain, a transmembrane domain, and a cytotoxic signaling complex,
[0651] wherein the extracellular ligand binding domain targets a tumor marker expressed by a target tumor cell,
[0652] wherein the immune cells are genetically edited at one or more locations in an HIF1-a target gene that encodes a corresponding HIF1-a protein,
[0653] wherein the edits yield reduced expression and/or function of the corresponding HIF1-a protein as compared to an immune cell not edited at the location or locations in the HIF1-a gene;
[0654] wherein the immune cells are optionally edited at one or more additional target sites in the genome of the immune cell to yield reduced levels of expression of the protein which is encoded by a gene which comprises an edited target site as compared to a non-edited immune cell,
[0655] wherein the edits to the target gene or target genes are made using an RNA-guided endonuclease, and
[0656] wherein the genetically engineered and edited immune cells exhibit one or more of enhanced expansion capability, enhanced cytotoxicity against target tumor cells, and enhanced persistence, as compared to immune cells that do not comprise said genetically edited target site or sites.
[0657] 8. The population of genetically engineered and gene edited immune cells of any one of Embodiments 1-7, wherein the immune cells are edited within an additional target sequence in a target gene to yield reduced levels of expression of a protein encoded by the target gene, as compared to an immune cell not edited within the additional target sequence.
[0658] 9. A population of genetically engineered and gene edited immune cells, comprising:
[0659] genetically engineered immune cells that express a cytotoxic receptor comprising an extracellular ligand binding domain, a transmembrane domain, and a cytotoxic signaling complex,
[0660] wherein the extracellular ligand binding domain targets a tumor marker expressed by a target tumor cell,
[0661] wherein the immune cells are genetically edited at one or more locations in a target gene selected from ADAM17, HIF-1a, DGKz, GSK-3B, LAG3, TIM3, TRIM29, IL-1R8, CD38, FBP-1, INSIG1, MED12, MED 13, CCNC, CDK8, TD3, SOX4, or any combination thereof,
[0662] wherein each of said genes encodes a corresponding protein
[0663] wherein the edits yield reduced expression and/or function of the corresponding protein as compared to an immune cell not edited at the location or locations in the respective gene;
[0664] wherein the immune cells are edited at one or more additional target sites in the genome of the immune cell to yield reduced levels of expression of the protein which is encoded by a gene which comprises an edited target site as compared to a non-edited immune cell,
[0665] wherein the edits to the target gene or target genes are made using an RNA-guided endonuclease, and
[0666] wherein the genetically engineered and edited immune cells exhibit one or more of enhanced expansion capability, enhanced cytotoxicity against target tumor cells, and enhanced persistence, as compared to immune cells that do not comprise said genetically edited target site or sites.
[0667] 10. The population of genetically engineered and gene edited immune cells of any one of Embodiments 1-9, wherein the edit(s) are made using a Crispr/Cas9 system.
[0668] 11. The population of genetically engineered and gene edited immune cells of any one of Embodiments 1 to 10, wherein the extracellular ligand binding domains targets an antigen selected from BCMA, a NKG2D ligand, CD19, and CD70.
[0669] 12. The population of genetically engineered and gene edited immune cells of any one of Embodiments 1 to 11, wherein the extracellular ligand binding domains target BCMA.
[0670] 13. A population of genetically engineered and gene edited immune cells, comprising:
[0671] genetically engineered immune cells that express a cytotoxic receptor comprising an extracellular ligand binding domain, a transmembrane domain, and a cytotoxic signaling complex,
[0672] wherein the extracellular ligand binding domain targets a tumor marker expressed by a target tumor cell,
[0673] wherein the immune cells are genetically edited at one or more locations in a target gene selected from ADAM17, HIF-1a, DGKz, GSK-3B, LAG3, TIM3, TRIM29, IL-1R8, CD38, FBP-1, INSIG1, MED12, MED13, CCNC, CDK8, ID3, SOX4, or any combination thereof,
[0674] wherein each of said genes encodes a corresponding protein
[0675] wherein the edits yield reduced expression and/or function of the corresponding protein as compared to an immune cell not edited at the location or locations in the respective gene;
[0676] wherein the immune cells are edited at one or more additional target sites in the genome of the immune cell to yield reduced levels of expression of the protein which is encoded by a gene which comprises an edited target site as compared to a non-edited immune cell,
[0677] wherein the edits to the target gene or target genes are made using a Crispr/Cas9 system, and
[0678] wherein the genetically engineered and edited immune cells exhibit one or more of enhanced expansion capability, enhanced cytotoxicity target tumor cells, and enhanced persistence, as compared to immune cells that do not comprise said genetically edited target site or sites.
[0679] 14. A population of genetically engineered and gene edited immune cells, comprising:
[0680] genetically engineered immune cells that express a cytotoxic receptor comprising an extracellular ligand binding domain, a transmembrane domain, and a cytotoxic signaling complex,
[0681] wherein the extracellular ligand binding domain targets a tumor marker expressed by a target tumor cell,
[0682] wherein the tumor marker expressed by the target tumor cell is selected from a ligand of the NKG2D receptor, CD19, or CD70;
[0683] wherein the immune cells are genetically edited at one or more locations in a target gene selected from ADAM17, HIF-1a, DGKz, GSK-3B, LAG3, TIM3, TRIM29, IL-1R8, CD38, FBP-1, INSIG1, MED12, MED13, CCNC, CDK8, ID3, SOX4, or any combination thereof,
[0684] wherein each of said genes encodes a corresponding protein
[0685] wherein the edits yield reduced expression and/or function of the corresponding protein as compared to an immune cell not edited at the location or locations in the respective gene;
[0686] wherein the immune cells are edited at one or more additional target sites in the genome of the immune cell to yield reduced levels of expression of the protein which is encoded by a gene which comprises an edited target site as compared to a non-edited immune cell,
[0687] wherein the edits to the target gene or target genes are made using a Crispr/Cas system, and
[0688] wherein the genetically engineered and edited immune cells exhibit one or more of enhanced expansion capability, enhanced cytotoxicity against target tumor cells, and enhanced persistence, as compared to immune cells that do not comprise said genetically edited target site or sites.
[0689] 15. A population of genetically engineered and gene edited immune cells, comprising genetically engineered immune cells that express a cytotoxic receptor comprising an extracellular ligand binding domain, a transmembrane domain, and a cytotoxic signaling complex, wherein:
[0690] the extracellular ligand binding domain targets an antigen expressed by cells of a target tumor or cancer selected from BCMA, a NKG2D ligand, CD19, and CD70;
[0691] the immune cells are genetically edited within a target sequence in a target gene selected from MED12, ADAM17, HIF-1a, DGKz, GSK-3B, LAG3, TIM3, TRIM29, IL-1R8, CD38, FBP-1, INSIG1, MED13, CCNC, CDK8, ID3, SOX4, and any combination thereof;
[0692] the edit yields reduced expression and/or function of the protein encoded by the target gene, as compared to an immune cell not edited within the target sequence in the target gene;
[0693] the immune cells are edited within an additional target sequence in a target gene to yield reduced levels of expression of the protein encoded by the target gene, as compared to an immune cell not edited within the additional target sequence; and
[0694] the edit(s) are made using a Crispr/Cas system.
[0695] 16. The population of genetically engineered and gene edited immune cells of any one of Embodiments 1 to 5, 8, and 10-12, wherein the genetically engineered and gene edited immune cells exhibit enhanced expansion capability, enhanced cytotoxicity against target tumor cells, enhanced persistence, or any combination thereof, as compared to immune cells that do not comprise the edit(s).
[0696] 17. The population of genetically engineered and gene edited immune cells of any one of Embodiments 1 to 18, wherein ADAM17 is edited and wherein a guide sequence of any of SEQ ID NO: 682-687 is used to target the ADAM17 gene.
[0697] 18. The population of genetically engineered and gene edited immune cells of any one of Embodiments 1 to 17, wherein HIF-1a is edited and wherein a guide sequence of any of SEQ ID NO: 750-760 is used to target the HIF-1a gene.
[0698] 19. The population of genetically engineered and gene edited immune cells of any one of Embodiments 1 to 18, wherein DGKz is edited and wherein a guide sequence of any of SEQ ID NO: 688-723 is used to target the DGKz gene.
[0699] 20. The population of genetically engineered and gene edited immune cells of any one of Embodiments 1 to 19, wherein GSK-3B is edited and wherein a guide sequence of any of SEQ ID NO: 724-749 is used to target the GSK-3B gene.
[0700] 21. The population of genetically engineered and gene edited immune cells of any one of Embodiments 1 to 209, wherein LAG3 is edited and wherein a guide sequence of any of SEQ ID NO: 761-789 is used to target the LAG3 gene.
[0701] 22. The population of genetically engineered and gene edited immune cells of any one of Embodiments 1 to 21, wherein TIM3 is edited and wherein a guide sequence of any of SEQ ID NO: 790-825 is used to target the TIM3 gene.
[0702] 23. The population of genetically engineered and gene edited immune cells of any one of Embodiments 1 to 22, wherein TRIM29 is edited and wherein a guide sequence of any of SEQ ID NO: 826-835 or 1009-1011 is used to target the TRIM29 gene.
[0703] 24. The population of genetically engineered and gene edited immune cells of any one of Embodiments 1 to 23, wherein IL-1R8 is edited and wherein a guide sequence of any of SEQ ID NO: 836-865 is used to target the IL-1R8 gene.
[0704] 25. The population of genetically engineered and gene edited immune cells of any one of Embodiments 1 to 24, wherein CD38 is edited and wherein a guide sequence of any of SEQ ID NO: 866-874 is used to target the CD38 gene.
[0705] 26. The population of genetically engineered and gene edited immune cells of any one of Embodiments 1 to 25, wherein FBP-1 is edited and wherein a guide sequence of any of SEQ ID NO: 875-889 is used to target the FBP-1 gene.
[0706] 27. The population of genetically engineered and gene edited immune cells of any one of Embodiments 1 to 26, wherein INSIG1 is edited and wherein a guide sequence of any of SEQ ID NO: 890-934 is used to target the INSIG1 gene.
[0707] 28. The population of genetically engineered and gene edited immune cells of any one of Embodiments 1 to 27, wherein MED12 is edited and wherein a guide sequence of any of SEQ ID NO: 938-944 or 996-998 is used to target the MED12 gene.
[0708] 29. The population of genetically engineered and gene edited immune cells of any one of Embodiments 1 to 28, wherein CDK8 is edited and wherein a guide sequence of any of SEQ ID NO: 949-955 is used to target the CDK8 gene.
[0709] 30. The population of genetically engineered and gene edited immune cells of any one of Embodiments 1 to 29, wherein CCNC is edited and wherein a guide sequence of any of SEQ ID NO: 956-961 is used to target the CCNC gene.
[0710] 31. The population of genetically engineered and gene edited immune cells of any one of Embodiments 1 to 30, wherein ID3 is edited and wherein a guide sequence of any of SEQ ID NO: 963-969 is used to target the ID3 gene.
[0711] 32. The population of genetically engineered and gene edited immune cells of any one of Embodiments 1 to 31, wherein SOX4 is edited and wherein a guide sequence of any of SEQ ID NO: 970-976 is used to target the SOX4 gene.
[0712] 33. The population of genetically engineered and gene edited immune cells of any of Embodiments 1 to 32, wherein the immune cells are further edited at a CISH gene that encodes a CIS protein.
[0713] 34. The population of genetically engineered and gene edited immune cells of Embodiment 33, wherein a guide sequence of any of SEQ ID NO: 153-157, 463-466, or 1012-1013 is used to target the CISH gene.
[0714] 35. The population of genetically engineered and gene edited immune cells of any one of Embodiments 1 to 34, wherein the cells are edited at an additional target site in a CBLB gene.
[0715] 36. The population of genetically engineered and gene edited immune cells of Embodiment 35, wherein a guide sequence of any of SEQ ID NO: 164 to 166, 453-456, or 1005-1008 is used to target the CBLB gene.
[0716] 37. The population of genetically engineered and gene edited immune cells of any one of Embodiments 1 to 36, wherein the cells are optionally edited at a gene encoding CD70.
[0717] 38. The population of genetically engineered and gene edited immune cells of any one of Embodiments 1 to 37, wherein the cells are optionally edited at a TGFBR2 gene, a TIGIT gene, an adenosine A2 receptor gene, a SMAD3 gene, a MAPKAPK3 gene, a CEACAM1 gene, a DDIT4 gene, an NKG2A gene, a SOCS2 gene, a B2M gene, a PD-1gene, and/or a TCR alpha gene.
[0718] 39. The population of genetically engineered and gene edited immune cells of any one of Embodiments 1 to 38, wherein the transmembrane domain comprises CD8, CD28, or a portion thereof, optionally wherein the transmembrane domain comprises CD8a or a portion thereof.
[0719] 40. The population of genetically engineered and gene edited immune cells of any one of Embodiments 1 to 39, wherein the cytotoxic signaling complex comprises a CD3zeta domain and an intracellular signaling domain of an OX40, 4-1 BB, CD28, or a signaling portion thereof, optionally an intracellular signaling domain of OX40 or a signaling portion thereof.
[0720] 41. The population of genetically engineered and gene edited immune cells of any one of Embodiments 1 to 40, wherein at least a portion of the genetically engineered immune cells are engineered to express membrane bound IL-15.
[0721] 42. The population of genetically engineered and gene edited immune cells of Embodiment 41, wherein the cytotoxic receptor and the mbIL15 are encoded by the same nucleic acid molecule, optionally wherein the nucleic acid sequences encoding the cytotoxic receptor and the mbIL15 are separated by a nucleic acid sequence encoding a 2A peptide.
[0722] 43. The population of genetically engineered and gene edited immune cells of any one of Embodiments 1 to 42, wherein the immune cells comprise Natural Killer (NK) cells, T cells, induced pluripotent stem cells (iPSCs), iPSC-derived NK cells, NK-92 cells, or combinations thereof.
[0723] 44. The population of genetically engineered and gene edited immune cells of any one of Embodiments 1 to 43, wherein the immune cells comprise NK cells.
[0724] 45. The population of genetically engineered and gene edited immune cells of any one of Embodiments 1 to 44, wherein the genetically engineered and edited immune cells are suitable for use in allogeneic cancer cell therapy and wherein the cells maintain enhanced cytotoxicity and/or persistence in a hypoxic tumor microenvironment.
[0725] 46. A composition comprising the population of genetically engineered and gene edited immune cells of any one of Embodiments 1 to 45.
[0726] 47. The composition of Embodiment 46, further comprising a pharmaceutically acceptable excipient.
[0727] 48. A method for the treatment of cancer in a subject comprising administering to the subject at least a portion of population of immune cells according to any of Embodiments 1 to 45.
[0728] 49. Use of genetically engineered and edited immune cells according to any of Embodiments 1 to 45 for the treatment of cancer.
[0729] 50. Use of genetically engineered and edited immune cells according to any of Embodiments 1 to 45 for the preparation of a medicament for the treatment of cancer.
[0730] 51. A method for the treatment of a subject having a disease or condition comprising administering to the subject a population of genetically engineered and gene edited natural killer (NK) cells that express a cytotoxic receptor comprising an extracellular ligand binding domain, a transmembrane domain, and a cytotoxic signaling complex, wherein:
[0731] the extracellular ligand binding domain targets an antigen expressed by cells of the disease or condition;
[0732] the immune cells are genetically edited within a target sequence in a MED12 gene comprising any one of SEQ ID NOS: 938-944 or 996-998;
[0733] the edit yields reduced expression and/or function of the MED12 protein encoded by the MED12 gene, as compared to an immune cell not edited within the target sequence in the MED12 gene; and
[0734] the edit to the MED12 gene is made using an RNA-guided endonuclease.
[0735] 52. A method for the treatment of a subject having a disease or condition comprising administering to the subject a population of genetically engineered and gene edited natural killer (NK) cells that express a cytotoxic receptor comprising an extracellular ligand binding domain, a transmembrane domain, and a cytotoxic signaling complex, wherein:
[0736] the extracellular ligand binding domain targets an antigen expressed by cells of the disease or condition;
[0737] the immune cells are genetically edited within a target sequence in a MED12 gene and within a target sequence in a CISH gene;
[0738] the edits yield reduced expression and/or function of each of the MED12 protein encoded by the MED12 gene and the CIS protein encoded by the CISH gene, as compared to a NK cell not edited within the target sequence in the MED12 gene and the target sequence within the CISH gene.
[0739] 53. The method of any one of Embodiments 48, 51, and 52, or the use of Embodiment 49 or 50, wherein the disease or condition is a cancer.
[0740] 54. The method of any one of Embodiments 48 and 51-53 or the use of any one of Embodiments 49, 50, and 53. wherein the immune cells are allogeneic to the subject.
[0741] 55. A method of manufacturing a population of genetically edited immune cells for cancer immunotherapy, comprising:
[0742] contacting the population of immune cells with a targeted endonuclease,
[0743] wherein the targeted endonuclease cuts nucleic acid at two or more target sites in a target gene selected from ADAM17, HIF-1a, DGKz, GSK-3B, LAG3, TIM3, TRIM29, IL-1R8, CD38, FBP-1, INSIG1, MED12, MED13, CCNC, CDK8, ID3, SOX4, CISH, CBLB, or any combination thereof, and
[0744] wherein the genetically edited immune cells exhibit one or more of enhanced expansion capability, enhanced cytotoxicity against target tumor cells, and enhanced persistence, as compared to immune cells that do not comprise said genetically edited target site or sites.
[0745] 56. A method of manufacturing a population of genetically edited immune cells for cancer immunotherapy, comprising:
[0746] contacting the population of immune cells with a RNA guided endonuclease,
[0747] wherein the RNA guided endonuclease edits at one or more target sites in a target gene selected from ADAM17, HIF-1a, DGKz, GSK-3B, LAG3, TIM3, TRIM29, IL-1R8, CD38, FBP-1, INSIG1, MED12, MED13, CCNC, CDK8, ID3, SOX4 or any combination thereof, and
[0748] wherein the genetically edited immune cells exhibit one or more of enhanced expansion capability, enhanced cytotoxicity against target tumor cells, and enhanced persistence, as compared to immune cells that do not comprise said genetically edited target site or sites.
[0749] 57. A method of manufacturing a population of genetically edited immune cells for cancer immunotherapy, comprising:
[0750] contacting the population of immune cells with a Cas-gRNA ribonucleoprotein complex (RNP),
[0751] wherein the RNP edits at one or more target sites in a target gene selected from ADAM17, HIF-1a, DGKz, GSK-3B, LAG3, TIM3, TRIM29, IL-1R8, CD38, FBP-1, INSIG1, MED12, MED13, CCNC, CDK8, ID3, SOX4 or any combination thereof,
[0752] wherein the Cas of the RNP comprises Cas9, CasX, CasY, or combinations thereof, and
[0753] wherein the genetically edited immune cells exhibit one or more of enhanced expansion capability, enhanced cytotoxicity against target tumor cells, and enhanced persistence, as compared to immune cells that do not comprise said genetically edited target site or sites.
[0754] 58. A method of manufacturing a population of genetically edited immune cells for cancer immunotherapy, comprising:
[0755] contacting the population of immune cells with a first RNA guided endonuclease,
[0756] wherein the endonuclease edits at one or more target sites in a target gene selected from ADAM17, HIF-1a, DGKz, GSK-3B, LAG3. TIM3, TRIM29, IL-1R8, CD38, FBP-1, INSIG1, MED12, MED13, CCNC, CDK8, ID3, SOX4, or any combination thereof; and
[0757] contacting the population of immune cells with a second RNA guided endonuclease,
[0758] wherein the second endonuclease edits at one or more target sites in a in a CISH gene of the immune cell to yield reduced levels of expression of CIS protein encoded by the CISH gene as compared to an immune cell not edited at the CISH gene, and
[0759] wherein the genetically edited immune cells exhibit one or more of enhanced expansion capability, enhanced cytotoxicity against target tumor cells, and enhanced persistence, as compared to immune cells that do not comprise said genetically edited target site or sites.
[0760] 59. A method of manufacturing a population of genetically edited immune cells for cancer immunotherapy, comprising:
[0761] contacting the population of immune cells with a first Cas-gRNA ribonucleoprotein complex (RNP),
[0762] wherein the RNP edits at one or more target sites wherein the RNP edits at one or more target sites in a target gene selected from ADAM17, HIF-1a, DGKz, GSK-3B, LAG3, TIM3, TRIM29, IL-1R8, CD38, FBP-1, INSIG1, MED12, MED13, CCNC, CDK8, ID3, SOX4, or any combination thereof
[0763] wherein the Cas of the RNP comprises Cas9, CasX, CasY, or combinations thereof, and
[0764] contacting the population of immune cells with a second RNP complex,
[0765] wherein the second RNP edits at one or more target sites in a in a CISH gene of the immune cell to yield reduced levels of expression of CIS protein encoded by the CISH gene as compared to an immune cell not edited at the CISH gene,
[0766] wherein the Cas of the RNP comprises Cas9, CasX, CasY, or combinations thereof, and
[0767] wherein the genetically edited immune cells exhibit one or more of enhanced expansion capability, enhanced cytotoxicity against target tumor cells, and enhanced persistence, as compared to immune cells that do not comprise said genetically edited target site or sites.
[0768] 60. A method of manufacturing a population of genetically edited immune cells for cancer immunotherapy, comprising:
[0769] contacting the population of immune cells with a first Cas-gRNA ribonucleoprotein complex (RNP),
[0770] wherein the RNP edits at one or more target sites wherein the RNP edits at one or more target sites in a target gene selected from ADAM17, HIF-1a, DGKz, GSK-3B, LAG3, TIM3, TRIM29, IL-1R8, CD38, FBP-1, INSIG1, MED12, MED13, CCNC, CDK8, ID3, SOX4, or any combination thereof
[0771] wherein the Cas of the RNP comprises Cas9, CasX, CasY, or combinations thereof, and
[0772] contacting the population of immune cells with a second RNP complex,
[0773] wherein the second RNP edits at one or more target sites in a in a CBLB gene of the immune cell to yield reduced levels of expression of CBLB protein encoded by the CBLB gene as compared to an immune cell not edited at the CBLB gene,
[0774] wherein the Cas of the RNP comprises Cas9, CasX, CasY, or combinations thereof, and
[0775] wherein the genetically edited immune cells exhibit one or more of enhanced expansion capability, enhanced cytotoxicity against target tumor cells, and enhanced persistence, as compared to immune cells that do not comprise said genetically edited target site or sites.
[0776] 61. A method of manufacturing a population of genetically edited immune cells for cancer immunotherapy, comprising:
[0777] contacting the population of immune cells with a first RNA-guided endonuclease,
[0778] wherein the first endonuclease edits at one or more target sites wherein the RNP edits at one or more target sites in a target gene selected from ADAM17, HIF-1a, DGKz, GSK-3B, LAG3, TIM3, TRIM29, IL-1R8, CD38, FBP-1, INSIG1, MED12, MED13, CCNC, CDK8, ID3, SOX4, or any combination thereof, and
[0779] contacting the population of immune cells with a second and a third RNA-guided endonuclease,
[0780] wherein the second RNA-guided endonuclease edits at one or more target sites in a in a CISH gene of the immune cell to yield reduced levels of expression of CIS protein encoded by the CISH gene as compared to an immune cell not edited at the CISH gene,
[0781] wherein the third RNA-guided endonuclease edits at one or more target sites in CBLB gene of the immune cell to yield reduced levels of expression of CBLB protein encoded by the CBLB gene as compared to an immune cell not edited at the CBLB gene, and
[0782] wherein the genetically edited immune cells exhibit one or more of enhanced expansion capability, enhanced cytotoxicity against target tumor cells, and enhanced persistence, as compared to immune cells that do not comprise said genetically edited target site or sites.
[0783] 62. A method of manufacturing a population of genetically edited immune cells for cancer immunotherapy, comprising:
[0784] contacting the population of immune cells with a first Cas-gRNA ribonucleoprotein complex (RNP),
[0785] wherein the RNP edits at one or more target sites wherein the RNP edits at one or more target sites in a target gene selected from ADAM17, HIF-1a, DGKz, GSK-3B, LAG3, TIM3, TRIM29, IL-1R8, CD38, FBP-1, INSIG1, MED12, MED13, CCNC, CDK8, ID3, SOX4, or any combination thereof, and
[0786] contacting the population of immune cells with a second and a third RNP complex,
[0787] wherein the second RNP edits at one or more target sites in a in a CISH gene of the immune cell to yield reduced levels of expression of CIS protein encoded by the CISH gene as compared to an immune cell not edited at the CISH gene,
[0788] wherein the third RNP edits at one or more target sites in CBLB gene of the immune cell to yield reduced levels of expression of CBLB protein encoded by the CBLB gene as compared to an immune cell not edited at the CBLB gene,
[0789] wherein the Cas of each of the RNP comprises Cas9, CasX, CasY, or combinations thereof and
[0790] wherein the genetically edited immune cells exhibit one or more of enhanced expansion capability, enhanced cytotoxicity against target tumor cells, and enhanced persistence, as compared to immune cells that do not comprise said genetically edited target site or sites.
[0791] 63. A method of manufacturing a population of genetically edited immune cells for cancer immunotherapy, comprising:
[0792] contacting the population of immune cells with a plurality of Cas-gRNA ribonucleoprotein complex (RNP),
[0793] wherein the plurality of RNP induces edits at one or more target sites in a CISH gene of the immune cell to yield reduced levels of expression of CIS protein encoded by the CISH gene as compared to an immune cell not edited at the CISH gene,
[0794] wherein the plurality of RNP induces edits at one or more target sites in CBLB gene of the immune cell to yield reduced levels of expression of CBLB protein encoded by the CBLB gene as compared to an immune cell not edited at the CBLB gene,
[0795] wherein the plurality of RNP induces edits at one or more target sites in a target gene selected from ADAM17, HIF-1a, DGKz, GSK-3B, LAG3, TIM3, TRIM29, IL-1R8, CD38, FBP-1, INSIG1, MED12, MED13, CCNC, CDK8, ID3, SOX4, or any combination thereof,
[0796] wherein the Cas of each of the plurality of RNP comprises Cas9, CasX, CasY, or combinations thereof, and
[0797] wherein the genetically edited immune cells exhibit one or more of enhanced expansion capability, enhanced cytotoxicity against target tumor cells, and enhanced persistence, as compared to immune cells that do not comprise said genetically edited target site or sites.
[0798] 64. The method of any one of Embodiments 55 to 63, further comprising contacting the population of immune cells with a vector comprising a polynucleotide encoding a cytotoxic receptor comprising an extracellular ligand binding domain, a transmembrane domain, and a cytotoxic signaling complex.
[0799] 65. The method of any one of Embodiments 55 to 64, wherein ADAM17 is edited and wherein a guide sequence of any of SEQ ID NO: 682-687 is used to target the ADAM17 gene.
[0800] 66. The method of any one of Embodiments 55 to 65, wherein HIF-1a is edited and wherein a guide sequence of any of SEQ ID NO: 750-760 is used to target the HIF-1a gene.
[0801] 67. The method of any one of Embodiments 55 to 66, wherein DGKz is edited and wherein a guide sequence of any of SEQ ID NO: 688-723 is used to target the DGKz gene.
[0802] 68. The method of any one of Embodiments 55 to 67, wherein GSK-3B is edited and wherein a guide sequence of any of SEQ ID NO: 724-749 is used to target the GSK-3B gene.
[0803] 69. The method of any one of Embodiments 55 to 68, wherein LAG3 is edited and wherein a guide sequence of any of SEQ ID NO: 761-789 is used to target the LAG3 gene.
[0804] 70. The method of any one of Embodiments 55 to 69, wherein TIM3 is edited and wherein a guide sequence of any of SEQ ID NO: 790-825 is used to target the TIM3 gene.
[0805] 71. The method of any one of Embodiments 55 to 70, wherein TRIM29 is edited and wherein a guide sequence of any of SEQ ID NO: 826-835 or 1009-1011 is used to target the TRIM29 gene.
[0806] 72. The method of any one of Embodiments 55 to 71, wherein IL-1R8 is edited and wherein a guide sequence of any of SEQ ID NO: 836-865 is used to target the IL-1R8 gene.
[0807] 73. The method of any one of Embodiments 55 to 72, wherein CD38 is edited and wherein a guide sequence of any of SEQ ID NO: 866-874 is used to target the CD38 gene.
[0808] 74. The method of any one of Embodiments 55 to 73, wherein FBP-1 is edited and wherein a guide sequence of any of SEQ ID NO: 875-889 is used to target the FBP-1 gene.
[0809] 75. The method of any one of Embodiments 55 to 74, wherein INSIG1 is edited and wherein a guide sequence of any of SEQ ID NO: 890-934 is used to target the INSIG1 gene.
[0810] 76. The method of any one of Embodiments 55 to 75, wherein MED12 is edited and wherein a guide sequence of any of SEQ ID NO: 938-944 or 996-998 is used to target the MED12 gene, and optionally wherein MED13 is edited and wherein a guide sequence of any of SEQ ID NO: 945-948 is used to target the MED13 gene.
[0811] 77. The method of any one of Embodiments 55 to 76, wherein CDK8 is edited and wherein a guide sequence of any of SEQ ID NO: 949-955 is used to target the CDK8 gene.
[0812] 78. The method of any one of Embodiments 55 to 77, wherein CCNC is edited and wherein a guide sequence of any of SEQ ID NO: 956-962 is used to target the CCNC gene.
[0813] 79. The method of any one of Embodiments 55 to 78, wherein ID3 is edited and wherein a guide sequence of any of SEQ ID NO: 963-969 is used to target the ID3 gene.
[0814] 80. The method of any one of Embodiments 55 to 79, wherein SOX4 is edited and wherein a guide sequence of any of SEQ ID NO: 970-976 is used to target the SOX4 gene.
[0815] 81. The method of any one of Embodiments 55 to 80, wherein CISH is edited and wherein a guide sequence of any of SEQ ID NO: 153-157, 463-466 or 1012-1013 is used to target the CISH gene.
[0816] 82. The method of any one of Embodiments 55 to 81, wherein CBLB is edited and wherein a guide sequence of any of SEQ ID NO: 164 to 166, 453-456, or 105-108 is used to target the CBLB gene.
[0817] 83. The method of any one of Embodiments 55 to 82, wherein the cells are optionally edited at a gene encoding CD70.
[0818] 84. The method of any one of Embodiments 55 to 83, wherein the cells are optionally edited at a TGFBR2 gene, a TIGIT gene, an adenosine A2 receptor gene, a SMAD3 gene, a MAPKAPK3 gene, a CEACAM1 gene, a DDIT4 gene, an NKG2A gene, a SOCS2 gene, a B2M gene, a PD-1gene, and/or a TCR alpha gene.
[0819] 85. The method of any one of Embodiments 55 to 84, wherein at least a portion of the genetically engineered immune cells are engineered to express membrane bound IL-15.
[0820] 86. The method of any one of Embodiments 55 to 85, wherein the cells are edited within target sequences in the CISH and MED12 genes.
[0821] 87. The method of any one of Embodiments 55 to 86, wherein the cells are edited within target sequences in the CISH, CBLB, and MED12 genes.
[0822] 88. The method of any one of Embodiments 55 to 85, wherein the cells are edited at CISH, CBLB, and ADAM17.
[0823] 89. The method of any one of Embodiments 55 to 85, wherein the cells are edited at CISH, CBLB, and HIF1a.
[0824] 90. The method of any one of Embodiments 55 to 85, wherein the cells are edited at CISH, CBLB, and FBP-1.
[0825] 91. The method of any one of Embodiments 64 to 90, wherein the extracellular ligand binding domain targets BCMA, CD19, CD70, or a NKG2D ligand.
[0826] 92. The method of any one of Embodiments 64 to 91, wherein the extracellular ligand binding domain targets BCMA.
[0827] 93. The method of any one of Embodiments 55 to 92, wherein the cells are also edited at CD70 and wherein the method further comprises contacting the population of immune cells with a vector comprising a polynucleotide encoding a cytotoxic receptor comprising an extracellular ligand binding domain that targets CD70, a transmembrane domain, and a cytotoxic signaling complex.
[0828] 94. The method of any one of Embodiments 55 to 92, wherein the method further comprises contacting the population of immune cells with a vector comprising a polynucleotide encoding a cytotoxic receptor comprising an extracellular ligand binding domain that targets a tumor marker, a transmembrane domain, and a cytotoxic signaling complex.
[0829] 95. The method of Embodiment 94, wherein the method does not comprise editing a gene encoding CD70.
[0830] 96. The method of Embodiment 94 or 95, wherein the cytotoxic receptor does not target CD19.
[0831] 97. The method of Embodiment 94, 95, or 96, wherein the cytotoxic receptor does not target NKG2D ligands.
[0832] 98. The method of any one of Embodiments 55 to 97, wherein the immune cells comprise Natural Killer (NK) cells, T cells, induced pluripotent stem cells (iPSCs), iPSC-derived NK cells, NK-92 cells, or combinations thereof.
[0833] 99. The method of any one of Embodiments 55 to 97, wherein the immune cells comprise Natural Killer (NK) cells.
[0834] 100. A method for treating cancer in a subject comprising,
   [0835] administering to the subject a population of genetically engineered immune cells,
   [0836] wherein the immune cells express a cytotoxic receptor comprising an extracellular ligand binding domain, a transmembrane domain, and a cytotoxic signaling complex,
   [0837] wherein the immune cells are genetically edited at one or more target locations in a CISH gene that encodes a CIS protein, wherein the edits yield reduced expression and/or function of CIS as compared to an immune cell not edited at the location or locations in the CISH gene;
[0838] wherein the immune cells are edited at one or more target locations in one more target genes selected from ADAM17, HIF-1a, DGKz, GSK-3B, LAG3, TIM3, TRIM29, IL-1R8, CD38, FBP-1, INSIG1, MED12, MED13, CCNC, CDK8, ID3, SOX4, or any combination thereof,
[0839] wherein the edits are made using an RNA-guided endonuclease, and
[0840] wherein the genetically engineered and edited immune cells exhibit one or more of enhanced expansion capability, enhanced cytotoxicity against target tumor cells, and enhanced persistence, particularly in a hypoxic tumor microenvironment, as compared to immune cells that do not comprise said genetically edited target site or sites.
[0841] 101. The method of embodiment 100, wherein the immune cells are genetically edited within a target sequence in the CBLB gene, wherein the edit yields reduced expression and/or function of the CBLB protein as compared to an immune cell that has not been edited within the target sequence in the CBLB gene.
[0842] 102. A method for treating cancer in a subject comprising,
[0843] administering to the subject a population of genetically engineered immune cells,
[0844] wherein the immune cells express a cytotoxic receptor comprising an extracellular ligand binding domain, a transmembrane domain, and a cytotoxic signaling complex,
[0845] wherein the immune cells are genetically edited at one or more target locations in a CISH gene that encodes a CIS protein, wherein the edits yield reduced expression and/or function of CIS as compared to an immune cell not edited at the location or locations in the CISH gene;
[0846] wherein the immune cells are genetically edited at one or more target locations in a CBLB gene that encodes a CBLB protein, wherein the edits yield reduced expression and/or function of CIS as compared to an immune cell not edited at the location or locations in the CBLB gene,
[0847] wherein the immune cells are edited at one or more target locations in one more target genes selected from ADAM17, HIF-1a, DGKz, GSK-3B, LAG3, TIM3, TRIM29, IL-1R8, CD38, FBP-1, INSIG1, MED12, MED13, CCNC, CDK8, ID3, SOX4, or any combination thereof,
[0848] wherein the edits are made using an RNA-guided endonuclease, and
[0849] wherein the genetically engineered and edited immune cells exhibit one or more of enhanced expansion capability, enhanced cytotoxicity against target tumor cells, and enhanced persistence, particularly in a hypoxic tumor microenvironment, as compared to immune cells that do not comprise said genetically edited target site or sites.
[0850] 103. The method of any one of Embodiments 100-102, wherein the RNA-guided endonuclease is a Crispr/CasX, Crispr/CasY, or Crispr/Cas9 system.
[0851] 104. The method of any one of Embodiments 100-103, wherein the cells are edited at an additional target gene encoding ADAR2A, SMAD3, MAPKAPK3, CEACAM1, DDIT4, NKG2A, SOCS2, B2M, PD-1, TIM-3, CD38, or TCR alpha.
[0852] 105. The method of any one of Embodiments 100-104, further comprising editing the immune cells at a gene encoding CD70, if the cytotoxic receptor targets CD70.
[0853] 106. The method of any one of Embodiments 100-105, wherein the cytotoxic receptor expressed by the immune cells binds to one or more epitopes of CD19, CD70, ligands of the NKG2D receptor, BCMA, CD38, GPRC5D, CD138 DLL3, EGFR, PSMA, FLT3, KREMEN2, or combinations thereof.
[0854] 107. The method of any one of Embodiments 100 to 106, wherein the wherein the immune cells comprise Natural Killer (NK) cells, T cells, induced pluripotent stem cells (iPSCs), iPSC-derived NK cells, NK-92 cells, or combinations thereof.
[0855] 108. The method of any one of Embodiments 100 to 107, wherein the immune cells comprise Natural Killer (NK) cells.
[0856] 109. The method of Embodiment 107, wherein the immune cells comprise a mixture of NK cells and T cells or a mixture of iPSC-derived NK cells and T cells.
[0857] 110. The method of any one of Embodiments 100 to 109, wherein the administered immune cells are allogeneic with respect the subject.
[0858] 111. The method of any one of Embodiments 100 to 110, further comprising administering IL2.
[0859] 112. A population of genetically engineered and gene edited immune cells, comprising:
[0860] genetically engineered immune cells that express a cytotoxic receptor comprising an extracellular ligand binding domain, a transmembrane domain, and a cytotoxic signaling complex, wherein:
[0861] the extracellular ligand binding domain targets an antigen expressed by cells of a target tumor or cancer;
[0862] the immune cells are genetically edited within a target sequence in a MED12 gene and within a target sequence in a CISH gene; and
[0863] the edits yield reduced expression and/or function of each of the MED12 protein encoded by the MED12 gene and the CIS protein encoded by the CISH gene, as compared to an immune cell not edited within the target sequence in the MED12 gene and the target sequence within the CISH gene.
[0864] 113. The population of genetically engineered and gene edited immune cells of Embodiment 112, wherein the target sequence within the MED12 gene comprises any one of SEQ ID NOS: 997, 938-944, 996, or 998.
[0865] 114. The population of genetically engineered and gene edited immune cells of Embodiment 112, wherein the target sequence in the CISH gene comprises any one of SEQ ID NOS: 1013, 153-157 or 463-466 or 1012.
[0866] 115. The population of genetically engineered and gene edited immune cells of Embodiment 112, wherein the extracellular ligand binding domains targets an antigen selected from BCMA, a NKG2D ligand, CD19, and CD70.
[0867] 116. The population of genetically engineered and gene edited immune cells of Embodiment 112, wherein the extracellular ligand binding domains target BCMA.
[0868] 117. The population of genetically engineered and gene edited immune cells of Embodiment 112, wherein the transmembrane domain comprises CD8, CD28, or a portion thereof, optionally wherein the transmembrane domain comprises CD8a or a portion thereof.
[0869] 118. The population of genetically engineered and gene edited immune cells of Embodiment 112, wherein the cytotoxic signaling complex comprises a CD3zeta domain; and/or the cytotoxic signaling complex comprises an intracellular signaling domain of an OX40, 4-1BB, CD28, or a signaling portion thereof, optionally an intracellular signaling domain of OX40 or a signaling portion thereof.
[0870] 119. The population of genetically engineered and gene edited immune cells of Embodiment 112, wherein at least a portion of the genetically engineered immune cells are engineered to express membrane bound IL-15 (mbIL15).
[0871] 120. The population of genetically engineered and gene edited immune cells of Embodiment 119, wherein the cytotoxic receptor and the mbIL15 are encoded by the same nucleic acid molecule, optionally wherein the nucleic acid sequences encoding the cytotoxic receptor and the mbIL15 are separated by a nucleic acid sequence encoding a 2A peptide.
[0872] 121. The population of genetically engineered and gene edited immune cells of Embodiment 112, wherein the cells are further genetically edited within a target sequence in the CBLB gene, wherein the target sequence in the CBLB gene comprises any one of SEQ ID NOS: 164, 165-166 or 453-456 or 1005-1008.
[0873] 122. The population of genetically engineered and gene edited immune cells of Embodiment 112, wherein the cells are further genetically edited within a target sequence in a disintegrin and metalloproteinase domain-containing protein 17 (ADAM17) gene comprising any one of SEQ ID NOS: 682-687.
[0874] 123. The population of genetically engineered and gene edited immune cells of Embodiment 112, wherein the cells are further genetically edited within a target sequence in a hypoxia-inducible factor 1-alpha (HIFI-a) gene comprising any one of SEQ ID NOS: 750-760.
[0875] 124. The population of genetically engineered and gene edited immune cells of Embodiment 112, wherein the cells are further genetically edited within a target sequence in a DGKz gene, and the target sequence comprises any one of SEQ ID NOS: 688-723.
[0876] 125. The population of genetically engineered and gene edited immune cells of Embodiment 112, wherein the cells are further genetically edited within a target sequence in a GSK-3B gene, and the target sequence comprises any one of SEQ ID NOS: 724-749.
[0877] 126. The population of genetically engineered and gene edited immune cells of Embodiment 112, wherein the cells are further genetically edited within a target sequence in a LAG3 gene, and the target sequence comprises any one of SEQ ID NOS: 761-789.
[0878] 127. The population of genetically engineered and gene edited immune cells of Embodiment 112, wherein the cells are further genetically edited within a target sequence in a TIM3 gene, and the target sequence comprises any one of SEQ ID NOS: 790-825.
[0879] 128. The population of genetically engineered and gene edited immune cells of Embodiment 112, wherein the cells are further genetically edited within a target sequence in a TRIM29 gene, and the target sequence comprises any one of SEQ ID NOS: 826-835 or 1009-1011.
[0880] 129. The population of genetically engineered and gene edited immune cells of Embodiment 112, wherein the cells are further genetically edited within a target sequence in a IL-1R8 gene, and the target sequence comprises any one of SEQ ID NOS: 836-865.
[0881] 130. The population of genetically engineered and gene edited immune cells of Embodiment 112, wherein the cells are further genetically edited within a target sequence in a CD38 gene, and the target sequence comprises any one of SEQ ID NOS: 866-874.
[0882] 131. The population of genetically engineered and gene edited immune cells of Embodiment 112, wherein the cells are further genetically edited within a target sequence in a FBP-1 gene, and the target sequence comprises any one of SEQ ID NOS: 875-889.
[0883] 132. The population of genetically engineered and gene edited immune cells of Embodiment 112, wherein the cells are further genetically edited within a target sequence in a INSIG1 gene, and the target sequence comprises any one of SEQ ID NOS: 890-934.
[0884] 133. The population of genetically engineered and gene edited immune cells of Embodiment 112, wherein the cells are further genetically edited within a target sequence in a CDK8 gene, and the target sequence comprises any one of SEQ ID NOS: 949-955.
[0885] 134. The population of genetically engineered and gene edited immune cells of Embodiment 112, wherein the cells are further genetically edited within a target sequence in a CCNC gene, and the target sequence comprises any one of SEQ ID NOS: 956-961 or 999-1001.
[0886] 135. The population of genetically engineered and gene edited immune cells of Embodiment 112, wherein the cells are further genetically edited within a target sequence in a ID3 gene, and the target sequence comprises any one of SEQ ID NOS: 963-969.
[0887] 136. The population of genetically engineered and gene edited immune cells of Embodiment 112, wherein the cells are further genetically edited within a target sequence in a SOX4 gene, and the target sequence comprises any one of SEQ ID NOS: 970-976.
[0888] 137. A population of genetically engineered and gene edited immune cells according to any one of Embodiments 112 to 136, wherein the edit to the target sequence or target sequences is made using an RNA-guided endonuclease.
[0889] 138. The population of genetically engineered and gene edited immune cells of Embodiment 137 wherein the edit to the target sequence or target sequences is made using a Crispr/Cas9 system.
[0890] 139. A population of genetically engineered and gene edited immune cells according to any one of Embodiments 112 to 138, wherein the immune cells comprise Natural Killer (NK) cells, T cells, induced pluripotent stem cells (iPSCs), iPSC-derived NK cells, iPSC-derived T cells, NK-92 cells, or any combination thereof.
[0891] 140. The population of genetically engineered and gene edited immune cells of Embodiment 139, wherein the immune cells are natural killer (NK) cells.
[0892] 141. A composition comprising the population of genetically engineered and gene edited immune cells of any one of Embodiments 112 to 140.
[0893] 142. A method for the treatment of a subject having a disease or condition comprising administering to the subject the population of genetically engineered and gene edited immune cells of any of Embodiments 112 to 140 or the composition of Embodiment 141.
[0894] 143. Use of the population of genetically engineered and edited immune cells of any of Embodiments 112 to 141 or the composition of Embodiment 142 for the treatment of a subject having a disease or condition.
[0895] 144. The method of Embodiment 142 or the use of Embodiment 143, wherein the disease or condition is an infectious disease, an autoimmune disease, a cancer, or a tumor.
[0896] 145. A population of gene edited immune cells, wherein the immune cells are genetically edited within a target sequence in a MED12 gene and within a target sequence in a CISH gene; and the edits yield reduced expression and/or function of each of the MED12 protein encoded by the MED12 gene and the CIS protein encoded by the CISH gene, as compared to an immune cell not edited within the target sequence in the MED12 gene and the target sequence within the CISH gene.
[0897] 146. The population of gene edited immune cells of Embodiment 145, wherein the gene edited immune cells are genetically engineered immune cells that express a cytotoxic receptor comprising an extracellular ligand binding domain, a transmembrane domain, and a cytotoxic signaling complex; and the extracellular ligand binding domain targets an antigen expressed by cells of a target tumor or cancer.
[0898] 147. A population of genetically engineered and gene edited immune cells that express a cytotoxic receptor comprising an extracellular ligand binding domain, a transmembrane domain, and a cytotoxic signaling complex, wherein the extracellular ligand binding domain targets an antigen expressed by cells of a target tumor or cancer; the immune cells are genetically edited within a target sequence in a MED12 gene, wherein the target sequence within the MED12 gene comprises any one of SEQ ID NOS: 997, 938-944, 996, or 998; and the edits yield reduced expression and/or function of the MED12 protein encoded by the MED12 gene, as compared to an immune cell not edited within the target sequence in the MED12 gene.
[0899] 148. The population of genetically engineered and/or gene edited immune cells of Embodiment 147, wherein the immune cells are NK cells.

### EXAMPLES

[0900] The following are non-limiting descriptions of experimental methods and materials that were used in examples disclosed below.

[0901] As provided for herein, gene editing (e.g., using a Crispr/Cas system or other guided endonuclease) is used to enhance the functionality (e.g., persistence, cytotoxicity, and/or other characteristics) of immune cells, such as NK cells and/or T cells. Edits may be made at a single gene to reduce, substantially reduce, or eliminate expression and/or function of the protein encoded by the gene. Additionally, edits may be made at multiple gene targets (e.g., two, three, four, or more targets) to reduce, substantially reduce, or eliminate expression and/or function of the protein encoded by each of the genes edited. In several embodiments, the lack of expression or function of the protein (or multiple proteins) imparts to the edited cells an unexpectedly effective phenotype, either in terms of persistence, degree of cytotoxic signaling (either amount and/or duration), resistance to tumor microenvironment suppressive effects, and/or other beneficial characteristics. In several embodiments, immune cells, such as NK cells are edited at one or more of the following target genes: CISH, CBLB, DGKz, GSK-3B, HIF-1a, ADAM17, LAG3, TIM3, TRIM29, IL-1R8, CD38, FBP-1, INSIG1, TIGIT, TGFBR2, MED12, CCNC, CDK8, ID3, and SOX4, and/or any other targets of gene editing disclosed herein. In several embodiments, the gene edited cells are also engineered to express a CAR as disclosed herein, for example those schematically depicted in FIG. 1.

### Example 1—Screening of Singular Editing Targets in CD19 CAR Expressing Cells

[0902] As discussed herein, gene editing targets can be targeted by, for example, a CRISPR/Cas system to reduce or eliminate the protein encoded by the target gene and enhance the functionality (e.g., cytotoxicity) or lifespan (e.g., persistence). Other editing modalities may also be used, depending on the embodiment, including other Cas enzymes, TALENs, zinc fingers, transposases, etc. This example relates to the screening of several single gene knock out (KO) candidates. FIG. 2 shows a schematic workflow for assessing the edits in, by way of example, NK cells. At day 0, NK cells were seeded at a density ranging from, for example about 0.1-1×10⁶ cells per cm². They were cultured in a media comprising IL2, IL12, and IL18 for 5 days (additional information regarding expansion of NK cells can be found in U.S. Pat. Nos. 7,435,596, or 8,026,087, US Patent Publication No. 2020/0016208, and U.S. patent application Ser. No. 17/628,105, each of which is incorporated by reference in its entirety herein). After 5 days, a partial media change was made, and an increased concentration of IL2 was added to the media in advance of electroporation to deliver the gene editing machinery (e.g., gRNA(s) and Crispr/Cas (e.g., Cas9)). Two days later, using elevated IL2 in the media, the cells were transduced with a viral vector encoding a CAR as provided for herein. This example, by way of a non-limiting embodiment, employed a CD19 targeting CAR. As in accordance with several embodiments disclosed herein, these cells were also engineered to express membrane-bound interleukin 15 (mbIL15). Three days after transduction, the edited and engineered cells were moved to a lower concentration IL2 media for 5 additional days, where a portion of the cell culture was collected for a first round of functional assays. Additional cells were cultured for another 14 days and then harvested for a second round of assays (hypoxia, cytotoxicity, expansion count, expression of edited target genes and/or CARs).

[0903] FIG. 3A shows data related to expression of a non-limiting embodiment of a CD19 targeting CAR by NK cells (CD56 positive) edited at the indicated target gene. As shown in FIG. 3A editing of any of DKGz, GSK-3B, HIF-1a, TRIM29, IL-1R8, CD38. or FBP-1 did not negatively impact the expression of the CD19 CAR. Likewise, as shown in FIG. 3B, neither did editing of ADAM17, LAG3, TIM3, INSIG1, or CISH. As controls, NK cells were subjected to mock electroporation and mock transduction (EP Control) or mock electroporation followed by transduction with the CD19 targeting CAR (EP Control CD19 CAR). Each of the edited cell populations exhibited similar CD19 CAR expression as the EP Control CD19 CAR shown in FIG. 3A, indicating that these candidate gene editing targets are not incompatible with CAR expression. Similar results were seen with another donor (data not shown).

[0904] An additional set of experiments set out to evaluate the efficiency of gene editing to knock out, for example, ADAM17, LAG3, TIM3, or CD38. These data are shown in FIG. 4A-4C and FIG. 5 summarizes the expression data for selected gene edits on NK cells from two donors, namely ADAM17, LAG3, TIM3, and CD38. As controls, NK cells were subjected to mock electroporation and mock transduction (EP UN) or mock electroporation followed by transduction with the CD19 targeting CAR (EP). As can be seen in this data, the editing of any of these targets did not appear to adversely impact CAR expression (as measured at day 11), and in fact, appeared in some instances to improve CAR expression (see e.g., ADAM17 in D11% CAR+ column in left and middle panels of FIG. 5). Again, these data indicate that the editing of indicated targets is not incompatible with robust CAR expression and in some instances can enhance CAR expression (and/or function).

[0905] Genome editing outcomes were analyzed with the CRISPR software pipeline to determine gene editing efficiency. FIG. 6 shows that editing efficiency % was similar across cells from three donors for all genes edited, with only slightly lower percentages seen for IL1R8 (82.26%) and FBP1 (74.05%) in cells from donor 548. These data indicate that highly efficient gene editing of selected targets can be accomplished while maintaining significant levels of expression of a tumor-directed CAR.

[0906] In several embodiments, the additional edits impart other beneficial characteristics to the edited cells (and in some embodiments, multiple edits further enhance cytotoxicity, as discussed below). An evaluation of the expansion capacity of edited NK cells was also undertaken. As shown in FIG. 7, the editing of each of the targets in this example still allowed for robust expansion from day 1 to 14, with EP control cells expanding over 2100 fold over 14 days and cells edited at a single target gene expanding from about 830-fold (CD38 edited) to nearly 1500-fold (DGKz edited). A similar expansion pattern was seen with a second donor. Thus, expression of a CAR as well as editing at a variety of target sites does not disrupt the robust expansion of the cells culture, rather, this expansion capacity is maintained across the panel of examples of editing targets.

[0907] Moving to an assessment of the cytotoxicity of cells edited at various targets, Raji tumor cells were cocultured with NK cells expressing a CD19 CAR and edited as indicated at day 14. Data are shown in FIG. 8A, where an E:T of 1:2 was used. Two re-challenges of the edited CD19 CAR-expressing NK cells with fresh Raji cells (arrows) were performed in order to attempt to separate the anti-tumor effects of the NK cells (which were quite similar up to the second re-challenge). While TRIM29, TIM3, IL1-R8 and INSIG1 editing did not appear to positively influence cytotoxicity (though in some embodiments, they may enhance other aspects of the edited cells, such as persistence), edits to ADAM17, CD38, FBP-1, HIF-1a and LAG3 appeared to enhance cytotoxicity over unedited cells expressing a CD19 CAR (EP+CD19 CAR) at day 14 (FIG. 8A) and day 21 (FIG. 8B). Taken together, these data indicated that the candidate gene editing targets disclosed herein are efficiently disrupted, when edited, do not disrupt CAR expression, allow for robust expansion capacity of host cells (e.g., NK cells), and can enhance cytotoxicity against target tumor cells.

[0908] As discussed herein, the TME is an environment which is generated as a result of tumor cell function and is a pro-tumor/anti-immune cell environment. One such aspect relates to the below normal oxygen levels in the TME, in some instances by hypoxia. Hypoxia can trigger various signaling pathways in immune cells that result in the dysfunction of immune cells (thereby aiding the tumor cells in avoiding detection/destruction). Assays were performed to measure glycolytic capacity in cells over time, as determined by extracellular acidification rate (ECAR). After taking basal measurements, test cells are exposed to glucose to fuel glycolytic metabolism. Glucose treatment was followed by oligomycin, an inhibitor of the mitochondrial ATP synthase, which shifts energy production to glycolysis and reveals maximum glycolytic capacity. Thereafter 2-DG was added, which shuts down glycolysis and allows determination of glycolytic reserve by comparing maximal glycolytic capacity induced by oligomycin, with glycolysis induced by glucose. During the glycolysis stress test, ADAM17 KO edited cells (squares) showed higher levels of glycolysis than other edits and unedited CD19-CAR NK cells (circles) (FIG. 9A, lower panel).

[0909] FIG. 9B includes data from an assay designed to measure the oxygen consumption rate (OCR) of cells over time (and other parameters of mitochondrial respiration, separated from non-mitochondrial oxygen consumption). After taking basal measurements, test cells were exposed to oligomycin, an inhibitor of the mitochondrial ATP synthase, which leaves only non-mitochondrial oxygen consumption leakage across the inner mitochondrial membrane (by proton gradient) as the only sources of oxygen consumption. Next p-trifluoro-methoxyphenyl hydrazone (FCCP) was added, which depolarizes the mitochondria and results in maximal oxygen consumption. Finally, electron transport chain inhibitors (rotenone/antimycin A) prevent the flow of electrons through the electron transport chain (meaning ADP cannot be converted to ATP) and stop mitochondrial oxygen consumption. Importantly, the spare capacity (the difference between the basal respiration rate and the maximal respiration rate) is indicative of the relative ability of the cell to endure the stresses of a hypoxic environment. Cobalt chloride (CoCl2) was used as a hypoxia mimetic and induced a hypoxic environment for testing of various gene editing groups. FIG. 9B (lower panel) shows oxygen consumption data from four experimental groups: HIF-1a KO/CD19CAR—CoCl2 hypoxia, EP-CD19CAR—CoCl2 hypoxia, EP-CD19 CAR—normoxia, and HIF-1a-CD19 CAR—normoxia. As can be seen in FIG. 9B, in normoxic conditions, the knockout of HIF-1a (inverted triangles) results in a substantially larger spare oxygen consumption capacity as compared to those EP controls (triangles). While the OCR values are lower, due to the hypoxic conditions, the knockout of HIF-1a (circles) imparts to those cells a greater spare capacity as compared to EP controls (squares). This added spare capacity due to knockout of HIF-l a is indicative of an NK cell more adaptable and better able to survive and function in the hypoxic tumor microenvironment.

[0910] Next, effector cytokine production of various gene edited groups expressing the non-limiting embodiments of a CD19-CAR was assessed. Gene edited cells were cocultured for three days with Raji cells at an effector to target cell ratio (E:T) of 1:1 before cytokine levels were measured. ADAM17 edited cells demonstrated higher levels of GM-CSF and interferon (IFN) gamma compared to other edited groups (FIG. 10). Other gene edited groups showed cytokine levels similar to or slightly higher than those of cells expressing CD19-CAR without editing (CD19 CAR) and substantially elevated levels as compared to EP control cells (EP) (FIG. 10).

### Example 2—Screening of Singular Additional Editing Targets in CD70 CAR Expressing Cells

[0911] As an additional non-limiting embodiment, screening of various non-limiting examples of targets for gene editing were undertaken in cells engineered to express a CD70-targeting CAR. These cells, in accordance with several embodiments disclosed herein, were also engineered to express mbIL15. In this example, to avoid cellular fratricide, NK cells were edited to knockout CD70 expression, as well as the additional singular target genes. FIG. 11 shows a schematic workflow for assessing the edits in, by way of example, NK cells. Cells were cultured in a media comprising IL2, IL12, and IL18 for 5 days. After 5 days, a partial media change was made, and an increased concentration of IL2 was added to the media in advance of electroporation to deliver the gene editing machinery. At day 6, CD70 with or without an additional gene editing target, was knocked out. On day 7, using elevated IL2 in the media, the cells were transduced with a viral vector encoding, as a non-limiting example, a CD70 targeting CAR as provided for herein. Four days after transduction, the edited and engineered cells were moved to a lower concentration IL2 media for 1 additional day. On day 12, IL2 concentration was increased, and on day 14/15 a portion of cells was collected for a first round of functional assay (Incucyte®, ECAR, OCR, tracking cell numbers).

[0912] Next, cell viability, efficiency of CD70 knock out, and CD70 CAR expression were evaluated in the groups of edited cells. These data are summarized in FIG. 12. As can be seen in the data, the editing of any of these targets did not appear to adversely impact cell viability (as measured at day 11). Additionally, CD70 knockdown (from control levels to <1%) and CD70 CAR expression (averaging about 91%) were successful. Taken together, these data indicated that the CD70 target was efficiently disrupted, the gene edits performed did not disrupt CAR expression and did not negatively impact cell survival.

[0913] As shown in FIG. 13, the editing of each of the targets in this example still allowed for robust expansion from day 0 to 14, with CD70 KO cells expanding over 1700 fold over 14 days and cells edited at an additional target gene expanding from about 700-fold (LAG3 edited) to about 1120 fold (HIF-l a edited). Thus, expression of a CAR as well as editing at a variety of target sites, in addition to CD70 KO, does not disrupt the ability of the cells to expand robustly in culture, rather, this ability is maintained across the panel of examples of editing targets.

[0914] Moving to an assessment of the cytotoxicity of cells edited at various targets, HL60 (left panel) and Molm13 cells (right panel) were cocultured with NK cells expressing a CD70 CAR and edited as indicated at day 14. Data are shown in FIG. 14, where an E:T of 1:2 was used. Edits to CISH, HIF-1a and ADAM17 showed increased cytotoxicity than other groups and appeared to enhance cytotoxicity over cells edited at CD70 and expressing a CD70 CAR (CD70 KO) at day 14.

[0915] NK cells expressing a non-limiting embodiment of a CD70 targeting CAR and edited as indicated were subjected to a cell mitochondrial stress test following three days of treatment with lactate. OCR was assessed by seahorse analysis and no significant differences were found in the test results among the differently edited groups (FIG. 15). Thus, none of the gene edits performed here negatively impacted mitochondrial function. Taken together, these data show that CD70-edited and CD70 CAR-expressing NK cells can further be edited to decrease expression of an additional target gene and thereby impart further advantageous functionality to the NK cells.

### Example 3—Multiplex Editing Targets in CD70 CAR Expressing Cells

[0916] FIG. 16 shows a schematic workflow for assessing edits to multiple targets (“multiplex gene edits”) in, by way of example, NK cells. Cells were cultured in a media comprising IL2, IL12, and IL18 for 5 days. After 5 days, a partial media change was made, and an increased concentration of IL2 was added to the media in advance of electroporation to deliver the gene editing machinery. At day 6, gene edits were made to knock out targets including CD70, CISH. CBLB, HIF-1a, ADAM17, and/or FBP-1, with double, triple and quadruple knockouts being generated. These cells, in accordance with several embodiments disclosed herein, were also engineered to express mbIL15. On day 7, using elevated IL2 in the media, the cells were transduced with a viral vector encoding a CD70 targeting CAR as provided for herein. Four days after transduction, the edited and engineered cells were moved to a lower concentration IL2 media for 1 additional day. On day 12, IL-2 concentration was increased, and on day 14/15 a portion of cells was collected for a first round of functional assay (injection, Incucyte®, hypoxia, ECAR, OCR, tracking cell numbers).

[0917] Next, efficiency of ADAM17 and CD70 knock down, and CD70-targeting CAR expression were evaluated in the groups of edited cells. These data are summarized in FIG. 17. As can be seen in the data, edits to ADAM17 reduced the percentage of cells expressing ADAM17 from 71.6% (mock electroporation control; EP) to 6.42% (CD70/ADAM17 KO) or 9.55% (CD70/CISH/CBLB/ADAM17 KO). Additionally, CD70 knockdown and CD70 CAR expression were successful. The percentage of cells expressing CD70 was reduced from 79.0% (EP) to less than 1.0% in all edited groups. CD70-targeting CAR expression averaged around 60%. Taken together, these data indicated that the CD70 and ADAM17 targets were efficiently disrupted, and the edits performed did not disrupt CAR expression.

[0918] Effects of the multiplex gene edits on cell expansion were also evaluated. As shown in FIG. 18, the editing of each of the targets in this example still allowed for robust expansion from day 1 to 15, with CD70 KO cells expanding over 4800-fold over 14 days and cells edited at an additional target gene expanding from about 1600-fold (CD70/CISH/CBLB/ADAM17 edited) to about 4400-fold (CD80/FBP-1 edited). Thus, expression of a CD70-directed CAR as well as editing at a variety of target sites, in addition to CD70 KO, does not disrupt the ability of the cells to expand robustly in culture, rather, this ability is maintained across the panel of editing targets.

[0919] Cytotoxicity of the cells edited at various targets indicated in FIGS. 17 and 18 was assessed next. 786-0 cells were cocultured with NK cells expressing a non-limiting embodiment of a CD70 targeting CAR and edited as indicated in FIG. 19A-19B at day 14. Data are shown in FIG. 19A, where an E:T of 1:2 was used, and FIG. 19B where an E:T of 1:4 was used. Edits to HIF-1a, FBP-1 and ADAM17 in addition to CISH and CISH/CBLB showed better cytotoxicity than other groups, consistent with the single edit data for HIF-1a and ADAM17 shown previously. Additionally, a cytotoxicity assay was performed where the edited cells were incubated with HL60 cells at a 1:1 (FIG. 19C) or 1:2 ratio (FIG. 19D). Cytotoxicity results with HL60 cells were consistent with 786-0 cells, where cells edited at HIF-1a, FBP-1 and ADAM17 in addition to CISH/CBLB showed improved cytotoxicity over other groups.

[0920] NK cells expressing a non-limiting embodiment of a CD70-directed CAR and edited as indicated in FIG. 20 were evaluated for response to mitochondrial stress under hypoxic conditions induced by CoCl2. NK cells expressing a non-limiting embodiment of a CD70-directed CAR and edited at HIF1a showed much higher respiratory capacity during hypoxic conditions (FIG. 20, left panel). A similar trend was identified when cells were edited at multiple targets (FIG. 20, right panel). As indicated previously in Example 1, the higher spare respiratory capacity in HIF-1a edited cells suggests that these NK cells would be better adapted to the hypoxic tumor microenvironment.

[0921] Taken together, these data demonstrate that multiplex editing, even to the point of editing four (or more) genes is feasible, still allows for robust expression of CARs targeting a desired tumor, and imparts to immune cells, such as NK cells, robust anti-tumor effects and/or enhanced persistence (e.g., survival and/or activity in the hypoxic TME).

### Example 4—Investigation of the Phenotypes, Proliferation and Cytotoxicity of ADAM17KO, CD19 or CD70 CAR NK Cells

[0922] FIG. 21 shows a schematic workflow for assessing the edits in, by way of example, NK cells. Cells were cultured in a media comprising IL2, IL12, and IL18 for 5 days. After 5 days, a partial media change was made, and an increased concentration of IL2 was added to the media in advance of electroporation to deliver the gene editing machinery. At day 6, ADAM17 was knocked out. On day 7, using elevated IL2 in the media, the cells were transduced with a viral vector encoding, in a non-limiting embodiment, a CD19-targeting CAR as provided for herein. Four days after transduction, the edited and engineered cells were moved to a lower concentration IL2 media for 1 additional day. On day 11, IL-2 concentration was increased, and on day 14/15 a portion of cells was collected for a first round of functional assay (Incucyte®, tracking cell numbers, NK cell phenotype).

[0923] CAR expression was evaluated on day 4 post transduction. As a control, NK cells were subjected to mock electroporation and transduction (EP UN). CD19-directed CAR expression (labeled as CD19 CAR) was found to be between 55-72% when assessing cells from two different donors (FIG. 22A). Therefore, editing of ADAM17 still allows for robust expression of the CD19-directed CAR. Additionally, efficiency of ADAM17 knock out was evaluated and ADAM17 was found to decrease from about 98% in mock electroporated controls (EP Control) to about 3-23% (FIG. 22B). Taken together, the data indicates that it was possible to generate cells that both featured a CD19-directed CAR and successful ADAM17 editing.

[0924] ADAM17 is responsible for the rapid cleavage of the activating FcγRIIIa (CD16a) from the surface of NK cells after activation which can result in temporary inhibition of antibody dependent cytotoxicity (ADCC) and the loss of the ensuing NK cytotoxicity. While chemical inhibitors of ADAM17 exist, directed reduction in ADAM17 could enhance ADCC (by removing a disruptor of that process) and avoid potential toxicities associated with chemical inhibitors. Therefore, NK cells were edited to knock out ADAM17, with or without expression of a CD19-directed CAR, and EP controls were stimulated with phorhol myristate acetate (PMA) at lug/mL or DMSO for 1 hour before CD16 and CD62L (ADAM17 substrates) expression were evaluated. PMA is a nonspecific activator of NK cells that induces shedding of ADAM17 substrates. As shown in FIG. 23A, and summarized in FIG. 23B, CD16 and CD62L expression decreased on short term PMA stimulated EP Control NK cells but not ADAM17KO NK cells, whether mock transduced (Untransduced) or engineered to express the exemplary CD19-directed CAR (ADAM17 KO CD19 CAR). EP controls stimulated with PMA exhibited CD16 positive percentages between 0.62-6.0%, whereas cells with edited ADAM17 showed CD16 positive % from 72.4-92.0%. In a related experiment, NK cells expressing an exemplary CD70-directed CAR were edited at ADAM17 (ADAM17 KO) and stimulated with 1 ug/mL PMA or DMSO for 1 hour before expression of various ADAM17 substrates was evaluated. As shown in FIG. 23C, CD16, TIM3, and CD62L expression decreased with PMA stimulation in unedited CD70 CAR NK cells, but not in ADAM17KO CD70 CAR NK cells. These data indicate that ADAM17 editing prevented loss of CD16, TIM3 and CD62L expression following PMA stimulation in edited NK cells expressing non-limiting embodiments of CD19 or CD70 CARs.

[0925] Having determined that ADAM17 editing disrupted reduction in surface CD16 expression following PMA treatment, a new experiment was designed to address whether the Fc binding properties of CD16 could be harnessed to impart increased ADCC upon ADAM17 edited NK cells. First, an assay was performed where Raji and Nalm6 cells were evaluated for CD20 expression by flow cytometry. As shown in FIG. 24A, CD20 expressing Raji cells were 100% positive, whereas Nalm6 cells expressed virtually undetectable levels of CD20. Next, cytotoxicity of ADAM17 edited NK cells against Raji cells was confirmed to be higher than EP control (FIG. 24B). FIG. 24C-24G show experiments where Raji cells were precoated with Rituximab (anti-CD20) or Cetuximab (anti-EGFR) for 30 minutes before cytotoxicity was assessed to determine if ADAM17 editing enhanced ADCC. Without being bound by theory, the putative mechanism of action resulting from ADAM17 editing is to maintain CD16 cell surface expression (because the normal ADAM17-induced cleavage is reduced), which allows for CD16 to bind to the Fc region of the non-limiting examples of anti-cancer antibodies (here, rituximab or cetuximab) and thereby induce synergistic cytotoxic effects in combination with the CD70-directed CAR NK cells. ADAM17 editing was found to enhance ADCC mediated by Cetuximab at E:T of 1:2 (FIG. 24C) and 1:4 (FIG. 24D). Similar results were achieved with Rituximab both with (FIG. 24E-F) and without (FIG. 24G) expression of a CD19-directed CAR. Thus, editing of ADAM17 reduced CD16 cleavage, improving ADCC over cytotoxicity levels achieved with cells expressing a CD19-directed CAR without ADAM17 editing.

### Example 5—Investigation of the Phenotypes, Proliferation and Cytotoxicity of CD70 CAR NK Cells

[0926] FIG. 25 shows a schematic workflow for assessing edits to multiple targets in, by way of example, NK cells. Cells were cultured in a media comprising IL2, IL12, and IL18 for 1 day. On day 1, CBLB editing was performed. On day 2, an increased concentration of IL2 was added to the media in advance of electroporation to deliver the gene editing machinery. On day 3, CD70 and CISH editing was performed. On days 4, cells were cultured in a media comprising IL2, IL12, and IL18 until day 6 when an increased concentration of IL2 was added to the media in advance of electroporation to deliver the gene editing machinery. Transduction of the CD70-directed CAR occurred on day 7. Cells were maintained with an elevated level of IL-2 until washing and culture at day 8. Cells were kept at low IL2 concentration until day 12 where IL2 concentration was elevated in advance of harvest at day 15.

[0927] NK cells edited for CD70/CBLB with ADAM17, HIF-1a, LAG3, CD38, or FBP-1 KO, with, or without edited CISH were evaluated for viability and fold expansion from day 1 and day 3 at day 7 as summarized in FIG. 26. Viability ranged from about 88 to about 94% across the edited groups. Fold expansion from day 1, before EP, ranged from about 7 to about 14-fold. Fold expansion from day 3. after EP, ranged from about 45 to over 120-fold. Thus, the multiplex editing performed in these groups still allows significant NK cell survival and expansion.

[0928] Next, editing efficiency was evaluated. As shown in FIG. 27A-27B CD70 editing to prevent fratricide resulted in a reduction in CD70 expression from 90.6% (FIG. 27B) to approximately 39%. Additionally, CD38 (FIG. 27C), LAG3 (FIG. 27D), and ADAM17 (FIG. 27E) editing successfully reduced expression of the respective target in both triple and quadruple knock outs compared to unedited controls. Flow cytometry results are summarized in FIG. 27F, indicating that the multiplex gene editing was successful.

[0929] Edited CD70-CAR expressing NK cells were evaluated for response to mitochondrial stress under hypoxic conditions induced by CoCl2. Similar to data in FIG. 20, above, CAR-NK cells with edited HIF-1a showed much higher respiratory capacity during hypoxic conditions compared to other edits (FIG. 28).

[0930] Cytotoxicity of the triple and quadruple knockout edited cells was assessed against the ACHN renal adenocarcinoma cell line (CD70 rich). NK cells expressing a CD70-directed CAR and edited as indicated were incubated with ACHN cells at a 1:4 E:T ratio at day 14. As shown in FIG. 29A, the cells expressing a CD70 CAR and edited at CD70/CBLB/CISH demonstrated the highest cytotoxicity amongst the triple knockouts. Amongst the quadruple knockouts in FIG. 29B, the CD70-directed CAR expressing ADAM17, HIF-1a, and FBP-1 edited cells (which were all further edited at CD70/CBLB/CISH) demonstrated enhanced levels of cytotoxicity.

[0931] Multiplex edited NK cells from a single donor were next evaluated in an in vivo anti-tumor activity assay where mice were injected with 786-0 cells at day −7. Multiplex edited NK cells expressing a CD70-directed CAR and edited as indicated were injected at day 0 and tumor volume (TV) was assessed over a 25 day period. As shown in FIG. 30A, cells edited to express a CD70-directed CAR in addition to CISH/CBLB/ADAM17KO were the most effective at controlling tumor volume. The multiplex edited NK cells from the same donor were evaluated in an additional in vivo anti-tumor activity assay where mice were injected with HL60 cells at day −2. Multiplex edited NK cells expressing a CD70-directed CAR were injected at day 0 and tumor volume (TV) was assessed over a 30-day period. Similar to the 786-0 model, cells expressing a CD70-directed CAR and knocked out for CISH/CBLB/ADAM17 were the most effective at controlling tumor volume (FIG. 30B). The expansion of the multiplex edited cells used in the 786-0 and HL60 tumor model experiments is shown below in Table E1.

TABLE E1
Expansion of Multiplex Edited NK Cells

| | Fold Expansion | | |
|---|---|---|---|
| Edit | Day 1-7 | Day 7-15 | Day 1-15 |
| CD70 | 53.32 | 91.48 | 4877.71 |
| CD70/BLB | 55.60 | 67.87 | 3773.57 |
| CD70/CISH | 48.77 | 57.39 | 2798.91 |
| CD70/HIF1a | 57.57 | 61.13 | 3525.37 |
| CD70/ADAM17 | 47.70 | 87.61 | 4179.00 |
| CD70/FBP-1 | 52.39 | 85.56 | 4482.49 |
| CD70/CISH/CBLB | 39.98 | 52.96 | 2117.34 |
| CD70/CISH/CBLB/HIF1a | 41.94 | 44.48 | 1865.49 |
| CD70/CISH/CBLB/ADAM17 | 39.59 | 40.90 | 1619.23 |
| CD70/CISH/CBLB/FBP-1 | 39.20 | 44.43 | 1741.66 |

[0932] Taken together, these data indicated that the multiplex candidate gene editing strategy described herein disrupted target genes efficiently, allowed for survival and robust expansion capacity of host cells, and enhanced cytotoxicity against target cancer cells in both in vitro and in vivo assays.

### Example 6—Screening of Additional Singular Editing Targets in CD70 CAR Expressing Cells

[0933] FIG. 31 shows a schematic workflow for assessing the edits in, by way of example, NK cells. Cells were cultured in a media comprising IL2, IL12, and IL18 for 5 days. After 5 days, a partial media change was made, and an increased concentration of IL2 was added to the media in advance of electroporation to deliver the gene editing machinery. At day 6, CD70 with or without an additional gene editing target was knocked out. Additional gene editing targets included MED12, CCNC, CDK8, ID3, and SOX4. Table E2 below shows non-limiting examples of gRNAs for these genes. Other gRNAs may be used in additional embodiments (see e.g., SEQ ID NOs: 941-948, 952-955, 959-962, 966-969, and/or 973-976).

TABLE E2
Additional Example Guide RNAs

| SEQ ID | | | |
|---|---|---|---|
| NO | Name | Sequence | Target |
| 938 | MED12 gRNA1 | TGCAATAATGCTGCTGAAGT | Exon 3 |
| 939 | MED12 gRNA2 | AGTTATCCTTCTGGTTCACT | Exon 3 |
| 940 | MED12 gRNA3 | GTCAGTGAACCAAGTGTTAA | Exon 3 |
| 996 | MED12 gRNA4 | AGGATTGAAGCTGACGTTCT | Exon 2 |
| 997 | MED12 gRNA5 | TAACTGCTCCCATAAGTACT | Exon 5 |
| 998 | MED12 gRNA6 | GTGGGATTACACCGAGAAGC | Exon 5 |
| 949 | CDK8 gRNA1 | AAGTGAAGCTGAGCAGCGAG | Exon 1 |
| 950 | CDK8 gRNA2 | AGACGTGACCATAAGTGCCT | Exon 1 |
| 951 | CDK8 gRNA3 | GCGCCGCCCAGCGCGGACAC | Intron 1 |
| 956 | CCNC gRNA1 | ATTGGTTCAAATTGTATAGT | Intron 2 |
| 957 | CCNC gRNA2 | AGAGAAACTTTAAATCCTTT | Exon 2 |
| 958 | CCNC gRNA3 | TTCTAGTTTGCAATGGATTT | Exon 2 |
| 999 | CCNC gRNA4 | TAGGCAAAGATCCGTTCTGT | Exon 9 |
| 961 | CCNC gRNA5 | TCTGTTGAAGGAGCGCCAAA | Exon 2 |
| 1000 | CCNC gRNA6 | ACCTTTGCTCCAGTATGTGC | Exon 8 |
| 1001 | CCNC gRNA7 | ATACCTAAAGCTATCATGAA | Exon 9 |
| 963 | ID3 gRNA1 | CTCCGGGTACCAGTTCCCGC | Exon 1 |
| 964 | ID3 gRNA2 | CTCAGCGGCTCCTCAGCTGC | Exon 1 |
| 965 | ID3 gRNA3 | CAGCATGAAGGCGCTGAGCC | Exon 1 |
| 969 | ID3 gRNA7 | TGGCCAGACTGCGTTCCGAC | Exon 1 |
| 970 | SOX4 gRNA1 | TTCCGTGTTCTCGGCATTGT | Exon 1 |
| 971 | SOX4 gRNA2 | GGCGATTCCCAGCTCGAGGC | Exon 1 |
| 972 | SOX4 gRNA4 | GCTGGTGCAAGACCCCGAGT | Exon 1 |
| 1012 | CISH gRNA9 | GCAGGCACCAGGATGCCTGG | Exon 3 |
| 1013 | CISH gRNA10 | GCATAGAGCTGGTCTCACTG | Exon 3 |

[0934] On day 7, using elevated IL2 in the media, the cells were transduced with a viral vector encoding a CD70 targeting CAR as provided for herein. At day 11, phenotype was evaluated, and cells were maintained at a low concentration of IL2 until functional assays were performed at day 14.

[0935] FIG. 33 shows data related to expression of a non-limiting embodiment of a CD70 targeting CAR by NK cells from three different donors edited at the indicated target genes by CRISPR/Cas9 and target-directed gRNA. Edits to MED12, CDK8, CCNC, ID3 and SOX4 were made using MED 12 gRNA pool (SEQ ID NOs: 938-940), CDK8 gRNA pool (SEQ ID NOs: 949-951), CCNC gRNA pool (SEQ ID NOs: 956-958), ID3 gRNA pool (SEQ ID NOs: 963-965) and SOX4 gRNA pool (SEQ ID NOs: 970-972) respectively. Edits to CISH were made using commercially available CISH-targeting gRNA sequences. As shown in FIG. 33, editing of any one of MED12, CDK8, CCNC, CISH, ID3 or SOX4 did not negatively impact the expression of CD70 CAR. Additionally, genome editing outcomes of particular targets were analyzed to determine gene editing efficiency. Table E3 shows that editing efficiency (% cells edited) was similar across cells from three donors for edited MED12 and ID3 genes. These data indicate that gene editing of selected targets can be accomplished while maintaining significant levels of expression of a tumor-directed CAR.

TABLE E3
Editing Efficiency

| | gRNAs | | | |
|---|---|---|---|---|
| Target | (SEQ ID NOS) | Donor 5667 | Donor 512 | Donor 558 |
| MED12 | 938-940 | 74.33% | 57.98% | 72.28% |
| ID3 | 963-965 | 98.94% | 98.73% | 98.73% |

[0936] Next, cytotoxicity of the edited NK cells was assessed against the 786-0 adenocarcinoma cell line. NK cells expressing a CD70-directed CAR and edited on day 6 as indicated were incubated with 786-0 cells at a 1:1 (FIG. 32A), or 1:2 (FIG. 32B) E:T ratio beginning at day 14. Tumor cells were re-provided as a rechallenge 4 and 7 days later. As shown in FIG. 32A-32B, the cells expressing a CD70 CAR and edited at MED12 demonstrated the highest cytotoxicity at both E:T ratios. Thus, MED12, CCNC, CDK8, ID3, and SOX4 represented additional editing targets that can enhance cytotoxicity of CAR expressing NK cells. Similar results were seen with two other donors (data not shown).

[0937] Effects of these singular edits on cell expansion were also evaluated. Cells from a healthy donor were expanded as a single lot until editing at various targets with the example gRNA sequences provided in Table E2 on Day 6. As shown in Table E4, the editing of each of the targets in this example still allowed for robust expansion from day 1 to 14, with CD70 KO cells expanding over 1900-fold over 14 days and cells edited at an additional target gene expanding from about 1500-fold (CD70/CISH edited) to about 2500-fold (CD70/CDK8 edited). A similar expansion pattern was seen with a second donor (data not shown). Thus, expression of a CD70-directed CAR as well as editing at a variety of target sites, in addition to CD70 KO, does not reduce the ability of the cells to expand robustly in culture. Rather, this ability is maintained across the panel of editing targets.

TABLE E4
Expansion of Additional Target Edited NK Cells from Donor 512

Fold expansion

| Target | Day 0-6 | Day 7-14 | Day 0-14 |
|---|---|---|---|
| CD70 KO | 84.3 | 23.56 | 1985.83 |
| CD70/MED12 KO | 84.3 | 25.09 | 2115.38 |
| CD70/CDK8 KO | 84.3 | 29.22 | 2463.50 |
| CD70/CCNC KO | 84.3 | 27.95 | 2356.16 |
| CD70/CISH KO | 84.3 | 18.02 | 1519.09 |
| CD70/ID3 KO | 84.3 | 26.27 | 2214.59 |
| CD70/SOX4 KO | 84.3 | 26.79 | 2258.16 |

[0938] Next, glycolytic capacity in NK cells expressing a non-limiting embodiment of a CD70-targeting CAR and edited as indicated was determined by assessing extracellular acidification rate (ECAR) and oxygen consumption rate (OCR) as described in Example 1. During the glycolysis stress test. MED12 KO edited CD70 CAR NK cells (squares) showed higher levels of glycolysis FIG. 34A and glycolytic capacity FIG. 34B than other edited and unedited CD70 CAR NK cells.

[0939] Taken together, these data indicate that editing of the exemplary gene targets does not disrupt CD70-CAR expression, allows for robust expansion capacity of host cells (e.g., NK cells), and can enhance cytotoxicity against target tumor cells.

### Example 7—Screening of Additional Singular and Multiplex Editing Targets in CD19 CAR Expressing Cells

[0940] As an additional non-limiting embodiment, screening of various non-limiting examples of singular and multiplex editing targets were undertaken in NK cells from a healthy donor that were engineered to express a CD19-targeting CAR. These cells, in accordance with several embodiments disclosed herein, were also engineered to express mbIL15. Cells were engineered, edited, and assessed substantially as described in Example 2 and illustrated in FIG. 11, except using a non-limiting example of a CD19 CAR. MED12, CISH, and CBLB were knocked out separately or in combination, with single, double and triple knockouts being generated. As controls, NK cells from the same donor were subjected to mock electroporation and transduction (EP) or mock electroporation and transduction with the CD19 CAR (EP+CD19 CAR).

[0941] FIG. 35 shows data related to expression of a non-limiting embodiment of a CD19 targeting CAR by NK cells edited at the indicated target genes. As shown in FIG. 35, single, double or triple knockouts of any of MED12, CISH, and/or CBLB resulted in comparable expression of the CD19 CAR as compared to NK cells subjected to mock electroporation (EP+CD19 CAR). The data indicate that these candidate gene editing targets are compatible with CAR engineering and expression. Similar results were seen with another donor (data not shown).

[0942] Next, cytotoxicity of the edited NK cells was assessed against the Nalm6 cancer cell line in the absence (FIG. 36A) or presence (FIG. 36B) of TGF-P. NK cells expressing a CD19-directed CAR were edited at indicated at day 6 and subsequently incubated with target Nalm6 cells at a 1:1 E:T ratio beginning at day 14. The NK cells were re-challenged with fresh Nalm6 cells approximately 2 and 5 days later. As shown in FIGS. 36A and 36B, the cells expressing a CD19 CAR and edited at MED12 alone (MED12), CISH and MED12 (CISH/MED12), or CISH, CBLB, and MED12 (CISH/CBLB/MED12) demonstrated the highest cytotoxicity. Thus, MED12, CBLB and CISH represent editing targets that can enhance cytotoxicity of CAR expressing NK cells, including in the presence of cytokines such as TGF-B. Similar results were seen with another donor (data not shown).

[0943] To test glycolysis of the NK cells expressing a non-limiting embodiment of a CD19-targeting CAR and edited as indicated, the NK cells were assessed for ECAR as previously described. NK cells expressing the exemplary CD19-directed CAR that were dual edited at CISH/MED12 (squares) or triple edited at CISH/CBLB/MED12 (triangles) showed higher levels of glycolysis compared to NK cells expressing the CD19-directed CAR that were dually edited at CISH/CBLB (circles) or singly edited at MED12 (inverted triangles) or HIF1alpha (diamonds) (FIG. 37).

[0944] To test whether the edits as indicated affect the proliferative ability of the NK cells, proliferation of edited CD19-CAR NK cells from three different healthy donors was monitored over a period of 4 weeks. Edits to CISH, MED12, and CBLB were made using the CISH gRNA10 (SEQ ID NO:1013; GCATAGAGCTGGTCTCACTG), MED12 gRNA5 (SEQ ID NO:997; TAACTGCTCCCATAAGTACT), and CBLB gRNA7 (SEQ ID NO:1008; TAATCTGGTGGACCTCATGA), respectively. As illustrated in FIG. 38A and quantified in FIG. 38B, proliferation of MED12 edited CD19-CAR NK cells (triangles) was lowest in all three donors, but this effect appeared to be at least partially rescued by CISH KO (circles).

[0945] In a further experiment, NK cells isolated from three different healthy donors were either unmodified, engineered to express a non-limiting embodiment of a CD19 CAR, or engineered to express a non-limiting embodiment of a CD19 CAR and edited at MED12 (e.g., using MED12 gRNA5). Cells were subjected to genotyping and whole genome karyotyping by KaryoStat® assay. No chromosomal aberrations were observed in any of the donor cells, regardless of CAR engineering and MED12 editing status (data not shown).

### Example 8—Investigation of the Phenotypes, Proliferation and Cytotoxicity of Multiplex Edited CD19 CAR NK Cells

[0946] FIG. 39 shows a schematic workflow for assessing edits to multiple targets in, by way of example, CD19-CAR NK cells in vivo. Cells were cultured in a media comprising IL2, IL12, and IL18 for 6 days. On day 6, an increased concentration of IL2 was added to the media in advance of electroporation to deliver the gene editing machinery to edit MED12, CISH, and CBLB using non-limiting embodiments of MED12 gRNA5, CISH gRNA10 and CBLB gRNA7 corresponding to SEQ ID NOS: 997, 1013 and 1008, respectively, with single, double and triple knockouts being generated. Table E2 shows other non-limiting examples of gRNAs that can be used to edit these genes. On day 7, cells were cultured in a media comprising IL-2, IL12, and ILl 8 in the presence of feeder cells until day 10 when an increased concentration of IL2 was added to the media. Transduction of the CD19 directed CAR occurred on day 10. Cells were maintained with an elevated level of IL-2 until day 13, and then moved to a lower IL2 concentration for 1 or more additional day(s), before the cells were collected for functional assays. As controls, NK cells were subjected to mock electroporation and transduced with the exemplary CD19-directed CAR (EP).

[0947] Genome editing outcomes were analyzed to determine gene editing efficiency. Table E5 shows that in vivo editing efficiency (provided as % edited cells) of each target was similar across single, double or triple edits of MED12, CISH and CBLB genes that were knocked down using MED12 gRNA5, CISH gRNA10 and CBLB gRNA7. These data indicate that efficient gene editing of selected targets can be accomplished regardless of whether single or multiple targets are being edited.

TABLE E5
Editing Efficiency of Multiplex targets in vivo

| | MED12 | CISH | CBLB |
|---|---|---|---|
| Target | KO % | KO % | KO % |
| CISH | — | 93.3% | — |
| MED12 | 79.0% | — | — |
| CBLB | — | — | 90.3% |
| CISH-B3/CBLB | — | 90.8% | 90.5% |
| CISH-B3/MED12 | 89.5% | 92.9% | — |
| CBLB/MED12 | 90.1% | — | 96.2% |
| CISH/CBLB/MED12 | 95.9% | 95.9% | 97.3% |

[0948] Next, an evaluation of the expansion capacity of NK cells isolated from a healthy donor sample and edited on Day 6 was undertaken. As shown in Table E6, single, double or triple editing of the targets using the gRNAs sequences provided above (MED12 gRNA5, CISH gRNA10 and CBLB gRNA7) allowed for robust expansion from day 1 to 14, with cells expanding from about 2500-fold (MED12 edited) to nearly 6000-fold (CISH/MED12 edited) or to nearly 4800-fold (CISH/CBLB/MED12 edited). In particular, NK cells edited at CISH/MED12 exhibited expansion comparable to that of NK cells subjected to mock electroporation (EP).

TABLE E6
Expansion of Multiplex Edited NK Cells in vivo

Fold Expansion

| Target | D 0-6 | D 6-10 | D 10-14 | Total |
|---|---|---|---|---|
| CISH | 68 | 5.13 | 9.10 | 3176.5 |
| MED12 | 68 | 4.27 | 8.68 | 2521.6 |
| CBLB | 68 | 5.22 | 8.93 | 3165.5 |
| CISH/CBLB | 68 | 7.56 | 8.13 | 4176.9 |
| CISH/MED12 | 68 | 10.64 | 8.40 | 6075.8 |
| CBLB/MED12 | 68 | 11.34 | 7.80 | 6016.4 |
| CISH/CBLB/MED12 | 68 | 10.61 | 6.68 | 4815.9 |
| EP | 68 | 12.86 | 6.88 | 6013.6 |

[0949] These data indicate that gene editing of selected targets can be accomplished while maintaining the expansion capacity across the panel of examples of editing targets.

[0950] Table E7 shows data related to expression of a non-limiting embodiment of a CD19 targeting CAR by NK cells edited at the indicated target genes. As shown in Table E7, single, double or triple knockouts of any of MED12, CISH, or CBLB (using MED12 gRNA5, CISH gRNA10 and CBLB gRNA7), did not negatively impact the percentage of cells expressing the CD19 CAR. Each of the edited cell populations exhibited an increased percentage of cells expressing the CD19 CAR as compared to the untransduced NK cells, indicating that multiple edits are compatible with CAR expression.

TABLE E7
Expression of Multiplex Edited NK Cells in vivo

| | % Cells Expressing |
|---|---|
| Target | CD19 CAR |
| CISH KO | 70 |
| CBLB KO | 68.7 |
| MED12 KO | 63.3 |
| CISH/CBLB KO | 66.3 |
| CBLB/MED12 KO | 61.2 |
| CISH/MED12 KO | 61 |
| CISH/CBLB/MED12 KO | 56.7 |
| EP + CD19 CAR | 66.4 |
| Untransduced | 3.42 (background) |

[0951] As shown in Table E8, cells expressing a CD19 CAR and edited at MED12 alone or in combination with other edits showed an increase in the CD56dim cell population.

TABLE E8
CD56^{dim} Cell Population in Multiplex Edited NK Cells in vivo

| Target | % CD56^{dim} cell population |
|---|---|
| CISH KO | 16 |
| CBLB KO | 12.8 |
| MED12 KO | 44.6 |
| CISH/CBLB KO | 13.1 |
| CBLB/MED12 KO | 49 |
| CISH/MED12 KO | 48.8 |
| CISH/CBLB/MED12 KO | 48 |
| EP + CD19 CAR | 8.96 |
| Untransduced | 19.3 |

[0952] Next, cytotoxicity of the edited NK cells was assessed in vitro. NK cells expressing a CD19-directed CAR were edited at day 6 using the gRNA sequences provided above and incubated beginning on day 14 in the absence (FIG. 40A) or presence (FIG. 40B) of TGF-β with Nalm6 target cells at a 1:2 or 1:1 E:T ratio, respectively. As shown in FIG. 40A, the cells expressing a CD19 CAR and edited at MED12 alone, or in combination with CBLB, CISH. or CISH and CBLB demonstrated the highest cytotoxicity. Similar results were observed when co-culture of NK and Nalm6 target cells was extended to Day 54. As shown in FIG. 40B, even in the presence of TGF-P, the cells expressing a CD19 CAR and edited at MED12 alone or in combination with CBLB demonstrated the highest cytotoxicity.

[0953] NK cells from a healthy donor were engineered to express a non-limiting embodiment of a CD19-directed CAR and edited on day 6 at CISH, MED12, CISH/CBLB, CISH/MED12, or CISH/CBLB/MED12 (using MED12 gRNA5, CISH gRNA10 and CBLB gRNA7). As a control, NK cells from the same donor were engineered to express the CD19-directed CAR and mock electroporated on day 6 (EP+CD19 CAR). Beginning on day 21, the NK cells were co-cultured with Nalm6 target cells at an E:T ratio of 1:1 in the presence or absence of TGF-B. After three days, cytokine production was assessed in co-culture supernatant by Luminex® multiplex assay. Knockout of MED12 alone or in combination with CBLB and/or CISH was generally observed to increase secretion of cytokines and cytotoxic proteins by NK cells (FIG. 40C). Similar results were observed with NK cells from a second donor (data not shown).

[0954] CD19 CAR-expressing NK cells that were edited at MED12 or mock electroporated were analyzed for cell surface expression of various activation markers. CD19 CAR NK cells edited at MED12 demonstrated increased levels of activation markers such as CD25, NKp44, NKp46, and CD69 compared to the EP NK cells (data not shown).

### Example 9—In Vivo Analysis of Multiplex Edited CAR NK Cells

[0955] NK cells were isolated from healthy human donors and were edited by CRISPR/Cas9 to disrupt MED12, CBLB, CISH, and combinations thereof using the MED12 gRNA5, CBLB gRNA7, and CISH gRNA10 sequences described in the preceding Examples. Edited cells were also engineered to express a non-limiting embodiment of a CD19-directed CAR and optionally a membrane-bound interleukin 15 (mbIL15).

[0956] 2×10⁵ Nalm6 cells were injected into NOD scid gamma (NSG) mice at day −4 and day 22. Vehicle or 5×10⁶ NK cells expressing the CD19-directed CAR and edited as indicated were injected into mice at day 0 and tumor burden was assessed over a 30-day period by bioluminescence imaging (BLI) as illustrated in FIG. 41A. As shown in FIG. 41B, cells edited to express a CD19-directed CAR and edited at MED12 alone, or in combination with CBLB, CISH, or CISH and CBLB were the most effective at controlling tumor burden. Persistence of the injected NK cells was also assessed in the mice. As shown in FIG. 41C, cells engineered to express a CD19-directed CAR and edited at CISH/MED12 (closed circle) or at CISH/CBLB/MED12 (open circle) displayed an increased persistence compared to the other groups. Together, these data are consistent with a finding that CAR NK cells edited at MED12 alone or in combination with other targets such as CISH and CBLB displayed in vivo persistence and tumor control.

### Example 10—Gene Editing of BCMA CAR NK Cells

[0957] As an additional non-limiting embodiment, screening of various non-limiting examples of singular and multiplex editing targets were undertaken in NK cells from two different healthy donors that were engineered to express a CAR targeting B cell maturation antigen (BCMA) and optionally a membrane-bound interleukin 15 (mbIL15). Cells were engineered, edited, and assessed substantially as described in Example 6 and illustrated in FIG. 31, except using non-limiting example of BCMA CARs and editing the cells at genetic loci encoding MED12 and CISH.

[0958] The NK cells were knocked out for MED12 alone (MED12 KO) or in combination with CISH (MED12/CISH KO) on Day 6 of culture via electroporation to deliver target-directed gRNAs and CRISPR/Cas9. On Day 7, the edited NK cells were transduced with a vector encoding a BCMA-targeting CAR incorporating an extracellular antigen-binding domain comprised of two anti-BCMA V_{H}Hs targeting different epitopes (e.g., SEQ ID NOS: 1087 and 1088) and connected by a Gly-Ser linker (e.g., SEQ ID NO:1015), a CD8-derived hinge and transmembrane domain (e.g., SEQ ID NO:14), either a 4-1BB (“BCMA1”; e.g., SEQ ID NO:1089) or OX-40 (“BCMA2”; e.g., SEQ ID NO:6) co-stimulatory domain, and a CD3zeta primary signaling domain (e.g., SEQ ID NO:8). As controls, NK cells from the same donor were subjected to mock electroporation and transduction with the BCMA CAR (BCMA CAR only).

[0959] The phenotype of the engineered and edited NK cells was assessed beginning on Day 10 of culture. Knockout of MED12 and CISH was confirmed in NK cells from both donors and was not observed to significantly affect the expansion or viability of the NK cells in culture. Between approximately 42-62% of the edited NK cells were observed to express the BCMA1 CAR, and between approximately 65-82% of edited NK cells were observed the express the BCMA2 CAR.

[0960] Beginning on Day 14, the engineered and edited NK cells were co-cultured with BCMA-expressing target cells and Incucyte® assays were performed to monitor the cytotoxicity of the NK cells against the target cells. Specifically, engineered and edited NK cells from two different donors were cultured with relatively low BCMA-expressing Daudi target cells or relatively high BCMA-expressing MM.1S target cells at various effector-to-target cell (E:T) ratios. Daudi target cells were re-provided as a rechallenge approximately four and seven days later, while MM.1S target cells were re-provided as a rechallenge approximately three, five, and seven days later. NK cells expressing the BCMA1 CAR and knocked out for MED12 alone or in combination with CISH demonstrated increased cytotoxicity against Daudi target cells at E:T ratios of 1:2 and 1:4 as compared to unedited BCMA1 CAR-expressing NK cells (representative data for both donors shown in FIGS. 42A-B). NK cells expressing the BCMA2 CAR and knocked out for MED12 alone or in combination with CISH demonstrated increased cytotoxicity against MM.1S target cells at E:T ratios of 1:1 and 1:2 as compared to unedited BCMA2 CAR-expressing NK cells (representative data for both donors shown in FIGS. 43A-B). Similar results were observed when BCMA2 CAR-expressing NK cells and MM.1S target cells were co-cultured at a 1:1 E:T ratio beginning on Day 21 (data not shown).

[0961] Without wishing to be bound by theory, the data indicate that knockout of MED 12 alone or in combination with CISH consistently increases target-specific cytotoxicity by NK cells, including when different CARs and CAR targets are assessed.

[0962] It is contemplated that various combinations or subcombinations of the specific features and aspects of the embodiments disclosed above may be made and still fall within one or more of the inventions. Further, the disclosure herein of any particular feature, aspect, method, property, characteristic, quality, attribute, element, or the like in connection with an embodiment can be used in all other embodiments set forth herein. Accordingly, it should be understood that various features and aspects of the disclosed embodiments can be combined with or substituted for one another in order to form varying modes of the disclosed inventions. Thus, it is intended that the scope of the present inventions herein disclosed should not be limited by the particular disclosed embodiments described above. Moreover, while the invention is susceptible to various modifications, and alternative forms, specific examples thereof have been shown in the drawings and are herein described in detail. It should be understood, however, that the invention is not to be limited to the particular forms or methods disclosed, but to the contrary, the invention is to cover all modifications, equivalents, and alternatives falling within the spirit and scope of the various embodiments described and the appended claims. Any methods disclosed herein need not be performed in the order recited. The methods disclosed herein include certain actions taken by a practitioner; however, they can also include any third-party instruction of those actions, either expressly or by implication. In addition, where features or aspects of the disclosure are described in terms of Markush groups, those skilled in the art will recognize that the disclosure is also thereby described in terms of any individual member or subgroup of members of the Markush group.

[0963] All references cited herein, including but not limited to published and unpublished applications, patents, and literature references, are incorporated herein by reference in their entirety and are hereby made a part of this specification. To the extent publications and patents or patent applications incorporated by reference contradict the disclosure contained in the specification, the specification is intended to supersede and/or take precedence over any such contradictory material.

### Sequences

[0964] In several embodiments, there are provided amino acid sequences that correspond to any of the nucleic acids disclosed herein (and/or included in the accompanying sequence listing), while accounting for degeneracy of the nucleic acid code. Furthermore, those sequences (whether nucleic acid or amino acid) that vary from those expressly disclosed herein (and/or included in the accompanying sequence listing), but have functional similarity or equivalency are also contemplated within the scope of the present disclosure. The foregoing includes mutants, truncations, substitutions, codon optimization, or other types of modifications.

[0965] In accordance with some embodiments described herein, any of the sequences may be used, or a truncated or mutated form of any of the sequences disclosed herein (and/or included in the accompanying sequence listing) may be used and in any combination. Sequences provided for herein that include an identifier, such as a tag or other detectable sequence (e.g., a Flag tag) are also provided for herein with the absence of such a tag or other detectable sequence (e.g., excluding the Flag tag from the listed sequence). A Sequence Listing in electronic format is submitted herewith. Some of the sequences provided in the Sequence Listing may be designated as Artificial Sequences by virtue of being non-naturally occurring fragments or portions of other sequences, including naturally occurring sequences. Some of the sequences provided in the Sequence Listing may be designated as Artificial Sequences by virtue of being combinations of sequences from different origins, such as humanized antibody sequences.

The application's sequence listing, which the Patent Office published only in electronic form, follows.

SEQUENCE LISTING (1089 sequences)

SEQ ID NO: 1 - DNA, 135 bp, synthetic construct
  source 1..135: mol_type = other DNA
accacgacgccagcgccgcgaccaccaacaccggcgcccaccatcgcgtcgcagcccctgtccctgcgcccagaggcgtgccggccagcggcggggggcgcagtgcacacgagggggctggacttcgcctgtgat

SEQ ID NO: 2 - protein, 45 aa, synthetic construct
TTTPAPRPPTPAPTIASQPLSLRPEACRPAAGGAVHTRGLDFACD

SEQ ID NO: 3 - DNA, 63 bp, synthetic construct
  source 1..63: mol_type = other DNA
atctacatctgggcgcccttggccgggacttgtggggtccttctcctgtcactggttatcacc

SEQ ID NO: 4 - protein, 21 aa, synthetic construct
IYIWAPLAGTCGVLLLSLVIT

SEQ ID NO: 5 - DNA, 111 bp, synthetic construct
  source 1..111: mol_type = other DNA
cggagggaccagaggctgccccccgatgcccacaagccccctgggggaggcagtttccggacccccatccaagaggagcaggccgacgcccactccaccctggccaagatc

SEQ ID NO: 6 - protein, 37 aa, synthetic construct
RRDQRLPPDAHKPPGGGSFRTPIQEEQADAHSTLAKI

SEQ ID NO: 7 - DNA, 336 bp, synthetic construct
  source 1..336: mol_type = other DNA
agagtgaagttcagcaggagcgcagacgcccccgcgtaccagcagggccagaaccagctctataacgagctcaatctaggacgaagagaggagtacgatgttttggacaagagacgtggccgggaccctgagatggggggaaagccgagaaggaagaaccctcaggaaggcctgtacaatgaactgcagaaagataagatggcggaggcctacagtgagattgggatgaaaggcgagcgccggaggggcaaggggcacgatggcctttaccagggtctcagtacagccaccaaggacacctacgacgcccttcacatgcaggccctgccccctcgc

SEQ ID NO: 8 - protein, 112 aa, synthetic construct
RVKFSRSADAPAYQQGQNQLYNELNLGRREEYDVLDKRRGRDPEMGGKPRRKNPQEGLYNELQKDKMAEAYSEIGMKGERRRGKGHDGLYQGLSTATKDTYDALHMQALPPR

SEQ ID NO: 9 - DNA, 63 bp, synthetic construct
  source 1..63: mol_type = other DNA
ggctctggcgagggaaggggttccctgcttacttgcggcgacgtcgaagagaatcccggtccg

SEQ ID NO: 10 - protein, 21 aa, synthetic construct
GSGEGRGSLLTCGDVEENPGP

SEQ ID NO: 11 - DNA, 342 bp, synthetic construct
  source 1..342: mol_type = other DNA
aactgggtcaacgtgattagcgatttgaagaaaatcgaggaccttatacagtctatgcatattgacgctacactgtatactgagagtgatgtacacccgtcctgtaaggtaacggccatgaaatgctttcttctggagctccaggtcatcagcttggagtctggggacgcaagcatccacgatacggttgaaaacctcatcatccttgcgaacaactctctctcatctaatggaaacgttacagagagtgggtgtaaggagtgcgaagagttggaagaaaaaaacatcaaagaatttcttcaatccttcgttcacatagtgcaaatgttcattaacacgtcc

SEQ ID NO: 12 - protein, 114 aa, synthetic construct
NWVNVISDLKKIEDLIQSMHIDATLYTESDVHPSCKVTAMKCFLLELQVISLESGDASIHDTVENLIILANNSLSSNGNVTESGCKECEELEEKNIKEFLQSFVHIVQMFINTS

SEQ ID NO: 13 - DNA, 207 bp, synthetic construct
  source 1..207: mol_type = other DNA
actaccacacccgccccgaggccacctacgccggcaccgactatcgccagtcaacccctctctctgcgccccgaggcttgccggcctgcggctggtggggcggtccacacccggggcctggattttgcgtgcgatatatacatctgggcacctcttgccggcacctgcggagtgctgcttctctcactcgttattacgctgtactgc

SEQ ID NO: 14 - protein, 66 aa, synthetic construct
TTTPAPRPPTPAPTIASQPLSLRPEACRPAAGGAVHTRGLDFACDIYIWAPLAGTCGVLLLSLVIT

SEQ ID NO: 15 - DNA, 30 bp, synthetic construct
  source 1..30: mol_type = other DNA
ggcggtggtggctctggtggtggcggcagc

SEQ ID NO: 16 - protein, 10 aa, synthetic construct
GGGGSGGGGS

SEQ ID NO: 17 - DNA, 30 bp, synthetic construct
  source 1..30: mol_type = other DNA
ggccaggccggctccggaggaggaggatcc

SEQ ID NO: 18 - protein, 10 aa, synthetic construct
GQAGSGGGGS

SEQ ID NO: 19 - DNA, 12 bp, synthetic construct
  source 1..12: mol_type = other DNA
ggccaggccggc

SEQ ID NO: 20 - protein, 4 aa, synthetic construct
GQAG

SEQ ID NO: 21 - DNA, 33 bp, synthetic construct
  source 1..33: mol_type = other DNA
ggcggcggcggtagcggtggtggcggctccgga

SEQ ID NO: 22 - protein, 11 aa, synthetic construct
GGGGSGGGGSG

SEQ ID NO: 23 - DNA, 18 bp, synthetic construct
  source 1..18: mol_type = other DNA
ggccaggccggctccgga

SEQ ID NO: 24 - protein, 6 aa, synthetic construct
GQAGSG

SEQ ID NO: 25 - DNA, 405 bp, Homo sapiens
  source 1..405: mol_type = other DNA
ttattcaaccaagaagttcaaattcccttgaccgaaagttactgtggcccatgtcctaaaaactggatatgttacaaaaataactgctaccaattttttgatgagagtaaaaactggtatgagagccaggcttcttgtatgtctcaaaatgccagccttctgaaagtatacagcaaagaggaccaggatttacttaaactggtgaagtcatatcattggatgggactagtacacattccaacaaatggatcttggcagtgggaagatggctccattctctcacccaacctactaacaataattgaaatgcagaagggagactgtgcactctatgcctcgagctttaaaggctatatagaaaactgttcaactccaaatacgtacatctgcatgcaaaggactgtg

SEQ ID NO: 26 - protein, 135 aa, Homo sapiens
LFNQEVQIPLTESYCGPCPKNWICYKNNCYQFFDESKNWYESQASCMSQNASLLKVYSKEDQDLLKLVKSYHWMGLVHIPTNGSWQWEDGSILSPNLLTIIEMQKGDCALYASSFKGYIENCSTPNTYICMQRTV

SEQ ID NO: 27 - DNA, 645 bp, Homo sapiens
  source 1..645: mol_type = other DNA
gggtggattcgtggtcggaggtctcgacacagctgggagatgagtgaatttcataattataacttggatctgaagaagagtgatttttcaacacgatggcaaaagcaaagatgtccagtagtcaaaagcaaatgtagagaaaatgcatctccattttttttctgctgcttcatcgctgtagccatgggaatccgtttcattattatggtaacaatatggagtgctgtattcctaaactcattattcaaccaagaagttcaaattcccttgaccgaaagttactgtggcccatgtcctaaaaactggatatgttacaaaaataactgctaccaattttttgatgagagtaaaaactggtatgagagccaggcttcttgtatgtctcaaaatgccagccttctgaaagtatacagcaaagaggaccaggatttacttaaactggtgaagtcatatcattggatgggactagtacacattccaacaaatggatcttggcagtgggaagatggctccattctctcacccaacctactaacaataattgaaatgcagaagggagactgtgcactctatgcctcgagctttaaaggctatatagaaaactgttcaactccaaatacgtacatctgcatgcaaaggactgtg

SEQ ID NO: 28 - DNA, 405 bp, synthetic construct
  source 1..405: mol_type = other DNA
ctgttcaatcaggaagtccagatccccctgacagagtcttactgcggcccatgtcccaagaactggatctgctacaagaacaattgttatcagttctttgacgagagcaagaactggtatgagtcccaggcctcttgcatgagccagaatgcctctctgctgaaggtgtacagcaaggaggaccaggatctgctgaagctggtgaagtcctatcactggatgggcctggtgcacatccctacaaacggctcttggcagtgggaggacggctccatcctgtctccaaatctgctgaccatcatcgagatgcagaagggcgattgcgccctgtacgccagctccttcaagggctatatcgagaactgctccacacccaatacctacatctgtatgcagaggaccgtg

SEQ ID NO: 29 - DNA, 126 bp, synthetic construct
  source 1..126: mol_type = other DNA
aaacggggcagaaagaaactcctgtatatattcaaacaaccatttatgagaccagtacaaactactcaagaggaagatggctgtagctgccgatttccagaagaagaagaaggaggatgtgaactg

SEQ ID NO: 30 - protein, 28 aa, synthetic construct
FWVLVVVGGVLACYSLLVTVAFIIFWVR

SEQ ID NO: 31 - protein, 39 aa, synthetic construct
KRSRLLHSDYMNMTPRRPGPTRKHYQPYAPPRDFAAYRS

SEQ ID NO: 32 - protein, 123 aa, synthetic construct
DIQMTQTTSSLSASLGDRVTISCRASQDISKYLNWYQQKPDGTVKLLIYHTSRLHSGVPSRFSGSGSGTDYSLTISNLEQEDIATYFCQQGNTLPYTFGGGTKLEITRADAAPTVSIFPPSSN

SEQ ID NO: 33 - protein, 120 aa, synthetic construct
EVKLQESGPGLVAPSQSLSVTCTVSGVSLPDYGVSWIRQPPRKGLEWLGVIWGSETTYYNSALKSRLTIIKDNSKSQVFLKMNSLQTDDTAIYYCAKHYYYGGSYAMDYWGQGTSVTVSS

SEQ ID NO: 34 - protein, 634 aa, synthetic construct
MLLLVTSLLLCELPHPAFLLIPDIQMTQTTSSLSASLGDRVTISCRASQDISKYLNWYQQKPDGTVKLLIYHTSRLHSGVPSRFSGSGSGTDYSLTISNLEQEDIATYFCQQGNTLPYTFGGGTKLEITGSTSGSGKPGSGEGSTKGEVKLQESGPGLVAPSQSLSVTCTVSGVSLPDYGVSWIRQPPRKGLEWLGVIWGSETTYYNSALKSRLTIIKDNSKSQVFLKMNSLQTDDTAIYYCAKHYYYGGSYAMDYWGQGTSVTVSSVEPKSSDKTHTCPPCPAPELLGGPSVFLFPPKPKDTLMISRTPEVTCVVVDVSHEDPEVKFNWYVDGVEVHNAKTKPREEQYNSTYRVVSVLTVLHQDWLNGKEYKCKVSNKALPAPIEKTISKAKGQPREPQVYTLPPSRDELTKNQVSLTCLVKGFYPSDIAVEWESNGQPENNYKTTPPVLDSDGSFFLYSKLTVDKSRWQQGNVFSCSVMHEALHNHYTQKSLSLSPGKMALIVLGGVAGLLLFIGLGIFFRVKFSRSADAPAYQQGQNQLYNELNLGRREEYDVLDKRRGRDPEMGGKPRRKNPQEGLYNELQKDKMAEAYSEIGMKGERRRGKGHDGLYQGLSTATKDTYDALHMQALPPR

SEQ ID NO: 35 - protein, 120 aa, synthetic construct
EVQLVESGGGLVQPGGSLRLSCAASGVSLPDYGVSWVRQAPGKGLEWVSVIWGSETTYYNSALKSRFTISRDNAKNSLYLQMNSLRAEDTAVYYCAKHYYYGGSYAMDYWGQGTLVTVSS

SEQ ID NO: 36 - protein, 107 aa, synthetic construct
DIQMTQSPSSLSASVGDRVTITCRASQDISKYLNWYQQKPGKAPKLLIYHTSRLHSGVPSRFSGSGSGTDFTLTISSLQPEDFATYYCQQGNTLPYTFGQGTKVEIK

SEQ ID NO: 37 - protein, 11 aa, synthetic construct
RASQDISKYLN

SEQ ID NO: 38 - protein, 7 aa, synthetic construct
HTSRLHS

SEQ ID NO: 39 - protein, 9 aa, synthetic construct
QQGNTLPYT

SEQ ID NO: 40 - protein, 10 aa, synthetic construct
GVSLPDYGVS

SEQ ID NO: 41 - protein, 16 aa, synthetic construct
VIWGSETTYYSSSLKS

SEQ ID NO: 42 - protein, 16 aa, synthetic construct
VIWGSETTYYQSSLKS

SEQ ID NO: 43 - protein, 16 aa, synthetic construct
VIWGSETTYYNSSLKS

SEQ ID NO: 44 - protein, 12 aa, synthetic construct
HYYYGGSYAMDY

SEQ ID NO: 45 - protein, 107 aa, synthetic construct
DIQMTQSPSSLSASVGDRVTITCRASQDISKYLNWYQQKPDQAPKLLIKHTSRLHSGVPSRFSGSGSGTDYTLTISSLQPEDFATYYCQQGNTLPYTFGQGTKLEIK

SEQ ID NO: 46 - protein, 107 aa, synthetic construct
DIQMTQSPSSLSASVGDRVTITCRASQDISKYLNWYQQKPGKAVKLLIYHTSRLHSGVPSRFSGSGSGTDYTLTISSLQPEDIATYFCQQGNTLPYTFGGGTKLEIK

SEQ ID NO: 47 - protein, 107 aa, synthetic construct
DIQMTQSPSFLSASVGDRVTITCRASQDISKYLNWYQQKPDQAPKLLIKHTSRLHSGVPSRFSGSGSGTDFTFTISSLQPEDIATYYCQQGNTLPYTFGQGTKLEIK

SEQ ID NO: 48 - protein, 107 aa, synthetic construct
DIQMTQSPSTLSASVGDRVTITCRASQDISKYLNWYQQKPDQAPKLLIKHTSRLHSGVPSRFSGSGSGTDFTFTISSLQPEDIATYYCQQGNTLPYTFGQGTKLEIK

SEQ ID NO: 49 - protein, 120 aa, synthetic construct
EVQLVESGGGLVQPGRSLRLSCTASGVSLPDYGVSWIRQPPGKGLEWIGVIWGSETTYYNSALKSRFTISRDNSKNTLYLQMNSLRAEDTAVYYCAKHYYYGGSYAMDYWGQGTLVTVSS

SEQ ID NO: 50 - protein, 120 aa, synthetic construct
QVQLQESGPGLVKPSETLSVTCTVSGVSLPDYGVSWIRQPPGKGLEWLGVIWGSETTYYNSALKSRLTISKDTSKNQVFLKMSSLTAADTAIYYCAKHYYYGGSYAMDYWGQGTLVTVSS

SEQ ID NO: 51 - protein, 120 aa, synthetic construct
EVQLVESGGGLVQPGRSLRLSCTASGVSLPDYGVSWVRQPPGKGLEWIGVIWGSETTYYNSALKSRFTISRDNSKNTLYLQMNSLRAEDTAVYYCAKHYYYGGSYAMDYWGQGTLVTVSS

SEQ ID NO: 52 - protein, 120 aa, synthetic construct
QVQLQESGPGLVKPSGTLSLTCAVSGVSLPDYGVSWIRQPPGKGLEWIGVIWGSETTYYNSALKSRVTISRDNSKNTLYLQMNSLRAEDTAVYYCAKHYYYGGSYAMDYWGQGTLVTVSS

SEQ ID NO: 53 - protein, 8 aa, synthetic construct
RASQDISK

SEQ ID NO: 54 - protein, 7 aa, synthetic construct
IYHTSRL

SEQ ID NO: 55 - protein, 9 aa, synthetic construct
QQGNTLPYT

SEQ ID NO: 56 - protein, 10 aa, synthetic construct
GVSLPDYGVS

SEQ ID NO: 57 - protein, 14 aa, synthetic construct
VIWGSETTYYNSAL

SEQ ID NO: 58 - protein, 12 aa, synthetic construct
HYYYGGSYAMDY

SEQ ID NO: 59 - DNA, 2210 bp, synthetic construct
  source 1..2210: mol_type = other DNA
ggatccgaattcgccgccaccatggccttaccagtgaccgccttgctcctgccgctggccttgctgctccacgccgccaggccggactacaaagacgatgacgataaaggcggtggtggctctggtggtggcggcagcgacatccagatgacacagactacatcctccctgtctgcctctctgggagacagagtcaccatcagttgcagggcaagtcaggacattagtaaatatttaaattggtatcagcagaaaccagatggaactgttaaactcctgatctaccatacatcaagattacactcaggagtcccatcaaggttcagtggcagtgggtctggaacagattattctctcaccattagcaacctggagcaagaagatattgccacttacttttgccaacagggtaatacgcttccgtacacgttcggaggggggaccaagctggagatcacaggtggcggtggctcgggcggtggtgggtcgggtggcggcggatctgaggtgaaactgcaggagtcaggacctggcctggtggcgccctcacagagcctgtccgtcacatgcactgtctcaggggtctcattacccgactatggtgtaagctggattcgccagcctccacgaaagggtctggagtggctgggagtaatatggggtagtgaaaccacatactataattcagctctcaaatccagactgaccatcatcaaggacaactccaagagccaagttttcttaaaaatgaacagtctgcaaactgatgacacagccatttactactgtgccaaacattattactacggtggtagctatgctatggactactggggccaaggaacctcagtcaccgtctcctcaaccacgacgccagcgccgcgaccaccaacaccggcgcccaccatcgcgtcgcagcccctgtccctgcgcccagaggcgtgccggccagcggcggggggcgcagtgcacacgagggggctggacttcgcctgtgatatctacatctgggcgcccttggccgggacttgtggggtccttctcctgtcactggttatcaccctttactgccggagggaccagaggctgccccccgatgcccacaagccccctgggggaggcagtttccggacccccatccaagaggagcaggccgacgcccactccaccctggccaagatcagagtgaagttcagcaggagcgcagacgcccccgcgtaccagcagggccagaaccagctctataacgagctcaatctaggacgaagagaggagtacgatgttttggacaagagacgtggccgggaccctgagatggggggaaagccgagaaggaagaaccctcaggaaggcctgtacaatgaactgcagaaagataagatggcggaggcctacagtgagattgggatgaaaggcgagcgccggaggggcaaggggcacgatggcctttaccagggtctcagtacagccaccaaggacacctacgacgcccttcacatgcaggccctgccccctcgcggctctggcgagggaaggggttccctgcttacttgcggcgacgtcgaagagaatcccggtccgatggccctcccagtaactgccctccttttgcccctcgcactccttcttcatgccgctcgccccaactgggtcaacgtgattagcgatttgaagaaaatcgaggaccttatacagtctatgcatattgacgctacactgtatactgagagtgatgtacacccgtcctgtaaggtaacggccatgaaatgctttcttctggagctccaggtcatcagcttggagtctggggacgcaagcatccacgatacggttgaaaacctcatcatccttgcgaacaactctctctcatctaatggaaacgttacagagagtgggtgtaaggagtgcgaagagttggaagaaaaaaacatcaaagaatttcttcaatccttcgttcacatagtgcaaatgttcattaacacgtccactaccacacccgccccgaggccacctacgccggcaccgactatcgccagtcaacccctctctctgcgccccgaggcttgccggcctgcggctggtggggcggtccacacccggggcctggattttgcgtgcgatatatacatctgggcacctcttgccggcacctgcggagtgctgcttctctcactcgttattacgctgtactgctaagcggccgcgtcgac

SEQ ID NO: 60 - protein, 724 aa, synthetic construct
MALPVTALLLPLALLLHAARPDYKDDDDKGGGGSGGGGSDIQMTQTTSSLSASLGDRVTISCRASQDISKYLNWYQQKPDGTVKLLIYHTSRLHSGVPSRFSGSGSGTDYSLTISNLEQEDIATYFCQQGNTLPYTFGGGTKLEITGGGGSGGGGSGGGGSEVKLQESGPGLVAPSQSLSVTCTVSGVSLPDYGVSWIRQPPRKGLEWLGVIWGSETTYYNSALKSRLTIIKDNSKSQVFLKMNSLQTDDTAIYYCAKHYYYGGSYAMDYWGQGTSVTVSSTTTPAPRPPTPAPTIASQPLSLRPEACRPAAGGAVHTRGLDFACDIYIWAPLAGTCGVLLLSLVITLYCRRDQRLPPDAHKPPGGGSFRTPIQEEQADAHSTLAKIRVKFSRSADAPAYQQGQNQLYNELNLGRREEYDVLDKRRGRDPEMGGKPRRKNPQEGLYNELQKDKMAEAYSEIGMKGERRRGKGHDGLYQGLSTATKDTYDALHMQALPPRGSGEGRGSLLTCGDVEENPGPMALPVTALLLPLALLLHAARPNWVNVISDLKKIEDLIQSMHIDATLYTESDVHPSCKVTAMKCFLLELQVISLESGDASIHDTVENLIILANNSLSSNGNVTESGCKECEELEEKNIKEFLQSFVHIVQMFINTSTTTPAPRPPTPAPTIASQPLSLRPEACRPAAGGAVHTRGLDFACDIYIWAPLAGTCGVLLLSLVITLYC

SEQ ID NO: 61 - DNA, 2231 bp, synthetic construct
  source 1..2231: mol_type = other DNA
ggatccgaattcgccgccaccatggccttaccagtgaccgccttgctcctgccgctggccttgctgctccacgccgccaggccggactacaaagacgatgacgataaaggcggtggtggctctggtggtggcggcagcgacatccagatgacacagactacatcctccctgtctgcctctctgggagacagagtcaccatcagttgcagggcaagtcaggacattagtaaatatttaaattggtatcagcagaaaccagatggaactgttaaactcctgatctaccatacatcaagattacactcaggagtcccatcaaggttcagtggcagtgggtctggaacagattattctctcaccattagcaacctggagcaagaagatattgccacttacttttgccaacagggtaatacgcttccgtacacgttcggaggggggaccaagctggagatcacaggtggcggtggctcgggcggtggtgggtcgggtggcggcggatctgaggtgaaactgcaggagtcaggacctggcctggtggcgccctcacagagcctgtccgtcacatgcactgtctcaggggtctcattacccgactatggtgtaagctggattcgccagcctccacgaaagggtctggagtggctgggagtaatatggggtagtgaaaccacatactataattcagctctcaaatccagactgaccatcatcaaggacaactccaagagccaagttttcttaaaaatgaacagtctgcaaactgatgacacagccatttactactgtgccaaacattattactacggtggtagctatgctatggactactggggccaaggaacctcagtcaccgtctcctcaaccacgacgccagcgccgcgaccaccaacaccggcgcccaccatcgcgtcgcagcccctgtccctgcgcccagaggcgtgccggccagcggcggggggcgcagtgcacacgagggggctggacttcgcctgtgatttttgggtgctggtggtggttggtggagtcctggcttgctatagcttgctagtaacagtggcctttattattttctgggtgaggagtaagaggagcaggctcctgcacagtgactacatgaacatgactccccgccgccccgggcccacccgcaagcattaccagccctatgccccaccacgcgacttcgcagcctatcgctccagagtgaagttcagcaggagcgcagacgcccccgcgtaccagcagggccagaaccagctctataacgagctcaatctaggacgaagagaggagtacgatgttttggacaagagacgtggccgggaccctgagatggggggaaagccgagaaggaagaaccctcaggaaggcctgtacaatgaactgcagaaagataagatggcggaggcctacagtgagattgggatgaaaggcgagcgccggaggggcaaggggcacgatggcctttaccagggtctcagtacagccaccaaggacacctacgacgcccttcacatgcaggccctgccccctcgcggctctggcgagggaaggggttccctgcttacttgcggcgacgtcgaagagaatcccggtccgatggccctcccagtaactgccctccttttgcccctcgcactccttcttcatgccgctcgccccaactgggtcaacgtgattagcgatttgaagaaaatcgaggaccttatacagtctatgcatattgacgctacactgtatactgagagtgatgtacacccgtcctgtaaggtaacggccatgaaatgctttcttctggagctccaggtcatcagcttggagtctggggacgcaagcatccacgatacggttgaaaacctcatcatccttgcgaacaactctctctcatctaatggaaacgttacagagagtgggtgtaaggagtgcgaagagttggaagaaaaaaacatcaaagaatttcttcaatccttcgttcacatagtgcaaatgttcattaacacgtccactaccacacccgccccgaggccacctacgccggcaccgactatcgccagtcaacccctctctctgcgccccgaggcttgccggcctgcggctggtggggcggtccacacccggggcctggattttgcgtgcgatatatacatctgggcacctcttgccggcacctgcggagtgctgcttctctcactcgttattacgctgtactgctaagcggccgcgtcgac

SEQ ID NO: 62 - protein, 731 aa, synthetic construct
MALPVTALLLPLALLLHAARPDYKDDDDKGGGGSGGGGSDIQMTQTTSSLSASLGDRVTISCRASQDISKYLNWYQQKPDGTVKLLIYHTSRLHSGVPSRFSGSGSGTDYSLTISNLEQEDIATYFCQQGNTLPYTFGGGTKLEITGGGGSGGGGSGGGGSEVKLQESGPGLVAPSQSLSVTCTVSGVSLPDYGVSWIRQPPRKGLEWLGVIWGSETTYYNSALKSRLTIIKDNSKSQVFLKMNSLQTDDTAIYYCAKHYYYGGSYAMDYWGQGTSVTVSSTTTPAPRPPTPAPTIASQPLSLRPEACRPAAGGAVHTRGLDFACDFWVLVVVGGVLACYSLLVTVAFIIFWVRSKRSRLLHSDYMNMTPRRPGPTRKHYQPYAPPRDFAAYRSRVKFSRSADAPAYQQGQNQLYNELNLGRREEYDVLDKRRGRDPEMGGKPRRKNPQEGLYNELQKDKMAEAYSEIGMKGERRRGKGHDGLYQGLSTATKDTYDALHMQALPPRGSGEGRGSLLTCGDVEENPGPMALPVTALLLPLALLLHAARPNWVNVISDLKKIEDLIQSMHIDATLYTESDVHPSCKVTAMKCFLLELQVISLESGDASIHDTVENLIILANNSLSSNGNVTESGCKECEELEEKNIKEFLQSFVHIVQMFINTSTTTPAPRPPTPAPTIASQPLSLRPEACRPAAGGAVHTRGLDFACDIYIWAPLAGTCGVLLLSLVITLYC

SEQ ID NO: 63 - DNA, 2213 bp, synthetic construct
  source 1..2213: mol_type = other DNA
ggatccgaattcgccgccaccatggccttaccagtgaccgccttgctcctgccgctggccttgctgctccacgccgccaggccggactacaaagacgatgacgataaaggcggtggtggctctggtggtggcggcagcgacatccagatgacacagactacatcctccctgtctgcctctctgggagacagagtcaccatcagttgcagggcaagtcaggacattagtaaatatttaaattggtatcagcagaaaccagatggaactgttaaactcctgatctaccatacatcaagattacactcaggagtcccatcaaggttcagtggcagtgggtctggaacagattattctctcaccattagcaacctggagcaagaagatattgccacttacttttgccaacagggtaatacgcttccgtacacgttcggaggggggaccaagctggagatcacaggtggcggtggctcgggcggtggtgggtcgggtggcggcggatctgaggtgaaactgcaggagtcaggacctggcctggtggcgccctcacagagcctgtccgtcacatgcactgtctcaggggtctcattacccgactatggtgtaagctggattcgccagcctccacgaaagggtctggagtggctgggagtaatatggggtagtgaaaccacatactataattcagctctcaaatccagactgaccatcatcaaggacaactccaagagccaagttttcttaaaaatgaacagtctgcaaactgatgacacagccatttactactgtgccaaacattattactacggtggtagctatgctatggactactggggccaaggaacctcagtcaccgtctcctcaaccacgacgccagcgccgcgaccaccaacaccggcgcccaccatcgcgtcgcagcccctgtccctgcgcccagaggcgtgccggccagcggcggggggcgcagtgcacacgagggggctggacttcgcctgtgatatctacatctgggcgcccttggccgggacttgtggggtccttctcctgtcactggttatcaccctttactgctgttggcttacaaaaaagaagtattcatccagtgtgcacgaccctaacggtgaatacatgttcatgagagcagtgaacacagccaaaaaatctagactcacagatgtgaccctaagagtgaagttcagcaggagcgcagacgcccccgcgtaccagcagggccagaaccagctctataacgagctcaatctaggacgaagagaggagtacgatgttttggacaagagacgtggccgggaccctgagatggggggaaagccgagaaggaagaaccctcaggaaggcctgtacaatgaactgcagaaagataagatggcggaggcctacagtgagattgggatgaaaggcgagcgccggaggggcaaggggcacgatggcctttaccagggtctcagtacagccaccaaggacacctacgacgcccttcacatgcaggccctgccccctcgcggctctggcgagggaaggggttccctgcttacttgcggcgacgtcgaagagaatcccggtccgatggccctcccagtaactgccctccttttgcccctcgcactccttcttcatgccgctcgccccaactgggtcaacgtgattagcgatttgaagaaaatcgaggaccttatacagtctatgcatattgacgctacactgtatactgagagtgatgtacacccgtcctgtaaggtaacggccatgaaatgctttcttctggagctccaggtcatcagcttggagtctggggacgcaagcatccacgatacggttgaaaacctcatcatccttgcgaacaactctctctcatctaatggaaacgttacagagagtgggtgtaaggagtgcgaagagttggaagaaaaaaacatcaaagaatttcttcaatccttcgttcacatagtgcaaatgttcattaacacgtccactaccacacccgccccgaggccacctacgccggcaccgactatcgccagtcaacccctctctctgcgccccgaggcttgccggcctgcggctggtggggcggtccacacccggggcctggattttgcgtgcgatatatacatctgggcacctcttgccggcacctgcggagtgctgcttctctcactcgttattacgctgtactgctaagcggccgcgtcgac

SEQ ID NO: 64 - protein, 725 aa, synthetic construct
MALPVTALLLPLALLLHAARPDYKDDDDKGGGGSGGGGSDIQMTQTTSSLSASLGDRVTISCRASQDISKYLNWYQQKPDGTVKLLIYHTSRLHSGVPSRFSGSGSGTDYSLTISNLEQEDIATYFCQQGNTLPYTFGGGTKLEITGGGGSGGGGSGGGGSEVKLQESGPGLVAPSQSLSVTCTVSGVSLPDYGVSWIRQPPRKGLEWLGVIWGSETTYYNSALKSRLTIIKDNSKSQVFLKMNSLQTDDTAIYYCAKHYYYGGSYAMDYWGQGTSVTVSSTTTPAPRPPTPAPTIASQPLSLRPEACRPAAGGAVHTRGLDFACDIYIWAPLAGTCGVLLLSLVITLYCCWLTKKKYSSSVHDPNGEYMFMRAVNTAKKSRLTDVTLRVKFSRSADAPAYQQGQNQLYNELNLGRREEYDVLDKRRGRDPEMGGKPRRKNPQEGLYNELQKDKMAEAYSEIGMKGERRRGKGHDGLYQGLSTATKDTYDALHMQALPPRGSGEGRGSLLTCGDVEENPGPMALPVTALLLPLALLLHAARPNWVNVISDLKKIEDLIQSMHIDATLYTESDVHPSCKVTAMKCFLLELQVISLESGDASIHDTVENLIILANNSLSSNGNVTESGCKECEELEEKNIKEFLQSFVHIVQMFINTSTTTPAPRPPTPAPTIASQPLSLRPEACRPAAGGAVHTRGLDFACDIYIWAPLAGTCGVLLLSLVITLYC

SEQ ID NO: 65 - DNA, 2357 bp, synthetic construct
  source 1..2357: mol_type = other DNA
ggatccgaattcgccgccaccatggccttaccagtgaccgccttgctcctgccgctggccttgctgctccacgccgccaggccggactacaaagacgatgacgataaaggcggtggtggctctggtggtggcggcagcgacatccagatgacacagactacatcctccctgtctgcctctctgggagacagagtcaccatcagttgcagggcaagtcaggacattagtaaatatttaaattggtatcagcagaaaccagatggaactgttaaactcctgatctaccatacatcaagattacactcaggagtcccatcaaggttcagtggcagtgggtctggaacagattattctctcaccattagcaacctggagcaagaagatattgccacttacttttgccaacagggtaatacgcttccgtacacgttcggaggggggaccaagctggagatcacaggtggcggtggctcgggcggtggtgggtcgggtggcggcggatctgaggtgaaactgcaggagtcaggacctggcctggtggcgccctcacagagcctgtccgtcacatgcactgtctcaggggtctcattacccgactatggtgtaagctggattcgccagcctccacgaaagggtctggagtggctgggagtaatatggggtagtgaaaccacatactataattcagctctcaaatccagactgaccatcatcaaggacaactccaagagccaagttttcttaaaaatgaacagtctgcaaactgatgacacagccatttactactgtgccaaacattattactacggtggtagctatgctatggactactggggccaaggaacctcagtcaccgtctcctcaaccacgacgccagcgccgcgaccaccaacaccggcgcccaccatcgcgtcgcagcccctgtccctgcgcccagaggcgtgccggccagcggcggggggcgcagtgcacacgagggggctggacttcgcctgtgatttttgggtgctggtggtggttggtggagtcctggcttgctatagcttgctagtaacagtggcctttattattttctgggtgaggagtaagaggagcaggctcctgcacagtgactacatgaacatgactccccgccgccccgggcccacccgcaagcattaccagccctatgccccaccacgcgacttcgcagcctatcgctccaaacggggcagaaagaaactcctgtatatattcaaacaaccatttatgagaccagtacaaactactcaagaggaagatggctgtagctgccgatttccagaagaagaagaaggaggatgtgaactgagagtgaagttcagcaggagcgcagacgcccccgcgtaccagcagggccagaaccagctctataacgagctcaatctaggacgaagagaggagtacgatgttttggacaagagacgtggccgggaccctgagatggggggaaagccgagaaggaagaaccctcaggaaggcctgtacaatgaactgcagaaagataagatggcggaggcctacagtgagattgggatgaaaggcgagcgccggaggggcaaggggcacgatggcctttaccagggtctcagtacagccaccaaggacacctacgacgcccttcacatgcaggccctgccccctcgcggctctggcgagggaaggggttccctgcttacttgcggcgacgtcgaagagaatcccggtccgatggccctcccagtaactgccctccttttgcccctcgcactccttcttcatgccgctcgccccaactgggtcaacgtgattagcgatttgaagaaaatcgaggaccttatacagtctatgcatattgacgctacactgtatactgagagtgatgtacacccgtcctgtaaggtaacggccatgaaatgctttcttctggagctccaggtcatcagcttggagtctggggacgcaagcatccacgatacggttgaaaacctcatcatccttgcgaacaactctctctcatctaatggaaacgttacagagagtgggtgtaaggagtgcgaagagttggaagaaaaaaacatcaaagaatttcttcaatccttcgttcacatagtgcaaatgttcattaacacgtccactaccacacccgccccgaggccacctacgccggcaccgactatcgccagtcaacccctctctctgcgccccgaggcttgccggcctgcggctggtggggcggtccacacccggggcctggattttgcgtgcgatatatacatctgggcacctcttgccggcacctgcggagtgctgcttctctcactcgttattacgctgtactgctaagcggccgcgtcgac

SEQ ID NO: 66 - protein, 773 aa, synthetic construct
MALPVTALLLPLALLLHAARPDYKDDDDKGGGGSGGGGSDIQMTQTTSSLSASLGDRVTISCRASQDISKYLNWYQQKPDGTVKLLIYHTSRLHSGVPSRFSGSGSGTDYSLTISNLEQEDIATYFCQQGNTLPYTFGGGTKLEITGGGGSGGGGSGGGGSEVKLQESGPGLVAPSQSLSVTCTVSGVSLPDYGVSWIRQPPRKGLEWLGVIWGSETTYYNSALKSRLTIIKDNSKSQVFLKMNSLQTDDTAIYYCAKHYYYGGSYAMDYWGQGTSVTVSSTTTPAPRPPTPAPTIASQPLSLRPEACRPAAGGAVHTRGLDFACDFWVLVVVGGVLACYSLLVTVAFIIFWVRSKRSRLLHSDYMNMTPRRPGPTRKHYQPYAPPRDFAAYRSKRGRKKLLYIFKQPFMRPVQTTQEEDGCSCRFPEEEEGGCELRVKFSRSADAPAYQQGQNQLYNELNLGRREEYDVLDKRRGRDPEMGGKPRRKNPQEGLYNELQKDKMAEAYSEIGMKGERRRGKGHDGLYQGLSTATKDTYDALHMQALPPRGSGEGRGSLLTCGDVEENPGPMALPVTALLLPLALLLHAARPNWVNVISDLKKIEDLIQSMHIDATLYTESDVHPSCKVTAMKCFLLELQVISLESGDASIHDTVENLIILANNSLSSNGNVTESGCKECEELEEKNIKEFLQSFVHIVQMFINTSTTTPAPRPPTPAPTIASQPLSLRPEACRPAAGGAVHTRGLDFACDIYIWAPLAGTCGVLLLSLVITLYC

SEQ ID NO: 67 - DNA, 2201 bp, synthetic construct
  source 1..2201: mol_type = other DNA
ggatccgaattcgccgccaccatggccttaccagtgaccgccttgctcctgccgctggccttgctgctccacgccgccaggccggactacaaagacgatgacgataaaggcggtggtggctctggtggtggcggcagcgacatccagatgacacagactacatcctccctgtctgcctctctgggagacagagtcaccatcagttgcagggcaagtcaggacattagtaaatatttaaattggtatcagcagaaaccagatggaactgttaaactcctgatctaccatacatcaagattacactcaggagtcccatcaaggttcagtggcagtgggtctggaacagattattctctcaccattagcaacctggagcaagaagatattgccacttacttttgccaacagggtaatacgcttccgtacacgttcggaggggggaccaagctggagatcacaggtggcggtggctcgggcggtggtgggtcgggtggcggcggatctgaggtgaaactgcaggagtcaggacctggcctggtggcgccctcacagagcctgtccgtcacatgcactgtctcaggggtctcattacccgactatggtgtaagctggattcgccagcctccacgaaagggtctggagtggctgggagtaatatggggtagtgaaaccacatactataattcagctctcaaatccagactgaccatcatcaaggacaactccaagagccaagttttcttaaaaatgaacagtctgcaaactgatgacacagccatttactactgtgccaaacattattactacggtggtagctatgctatggactactggggccaaggaacctcagtcaccgtctcctcaaccacgacgccagcgccgcgaccaccaacaccggcgcccaccatcgcgtcgcagcccctgtccctgcgcccagaggcgtgccggccagcggcggggggcgcagtgcacacgagggggctggacttcgcctgtgatccattttttttctgctgcttcatcgctgtagccatgggaatccgtttcattattatggtaacacggagggaccagaggctgccccccgatgcccacaagccccctgggggaggcagtttccggacccccatccaagaggagcaggccgacgcccactccaccctggccaagatcagagtgaagttcagcaggagcgcagacgcccccgcgtaccagcagggccagaaccagctctataacgagctcaatctaggacgaagagaggagtacgatgttttggacaagagacgtggccgggaccctgagatggggggaaagccgagaaggaagaaccctcaggaaggcctgtacaatgaactgcagaaagataagatggcggaggcctacagtgagattgggatgaaaggcgagcgccggaggggcaaggggcacgatggcctttaccagggtctcagtacagccaccaaggacacctacgacgcccttcacatgcaggccctgccccctcgcggctctggcgagggaaggggttccctgcttacttgcggcgacgtcgaagagaatcccggtccgatggccctcccagtaactgccctccttttgcccctcgcactccttcttcatgccgctcgccccaactgggtcaacgtgattagcgatttgaagaaaatcgaggaccttatacagtctatgcatattgacgctacactgtatactgagagtgatgtacacccgtcctgtaaggtaacggccatgaaatgctttcttctggagctccaggtcatcagcttggagtctggggacgcaagcatccacgatacggttgaaaacctcatcatccttgcgaacaactctctctcatctaatggaaacgttacagagagtgggtgtaaggagtgcgaagagttggaagaaaaaaacatcaaagaatttcttcaatccttcgttcacatagtgcaaatgttcattaacacgtccactaccacacccgccccgaggccacctacgccggcaccgactatcgccagtcaacccctctctctgcgccccgaggcttgccggcctgcggctggtggggcggtccacacccggggcctggattttgcgtgcgatatatacatctgggcacctcttgccggcacctgcggagtgctgcttctctcactcgttattacgctgtactgctaagcggccgcgtcgac

SEQ ID NO: 68 - protein, 721 aa, synthetic construct
MALPVTALLLPLALLLHAARPDYKDDDDKGGGGSGGGGSDIQMTQTTSSLSASLGDRVTISCRASQDISKYLNWYQQKPDGTVKLLIYHTSRLHSGVPSRFSGSGSGTDYSLTISNLEQEDIATYFCQQGNTLPYTFGGGTKLEITGGGGSGGGGSGGGGSEVKLQESGPGLVAPSQSLSVTCTVSGVSLPDYGVSWIRQPPRKGLEWLGVIWGSETTYYNSALKSRLTIIKDNSKSQVFLKMNSLQTDDTAIYYCAKHYYYGGSYAMDYWGQGTSVTVSSTTTPAPRPPTPAPTIASQPLSLRPEACRPAAGGAVHTRGLDFACDPFFFCCFIAVAMGIRFIIMVTRRDQRLPPDAHKPPGGGSFRTPIQEEQADAHSTLAKIRVKFSRSADAPAYQQGQNQLYNELNLGRREEYDVLDKRRGRDPEMGGKPRRKNPQEGLYNELQKDKMAEAYSEIGMKGERRRGKGHDGLYQGLSTATKDTYDALHMQALPPRGSGEGRGSLLTCGDVEENPGPMALPVTALLLPLALLLHAARPNWVNVISDLKKIEDLIQSMHIDATLYTESDVHPSCKVTAMKCFLLELQVISLESGDASIHDTVENLIILANNSLSSNGNVTESGCKECEELEEKNIKEFLQSFVHIVQMFINTSTTTPAPRPPTPAPTIASQPLSLRPEACRPAAGGAVHTRGLDFACDIYIWAPLAGTCGVLLLSLVITLYC

SEQ ID NO: 69 - DNA, 1805 bp, synthetic construct
  source 1..1805: mol_type = other DNA
ggatccgaattcgccgccaccatggccttaccagtgaccgccttgctcctgccgctggccttgctgctccacgccgccaggccggactacaaagacgatgacgataaaggcggtggtggctctggtggtggcggcagcgacatccagatgacacagactacatcctccctgtctgcctctctgggagacagagtcaccatcagttgcagggcaagtcaggacattagtaaatatttaaattggtatcagcagaaaccagatggaactgttaaactcctgatctaccatacatcaagattacactcaggagtcccatcaaggttcagtggcagtgggtctggaacagattattctctcaccattagcaacctggagcaagaagatattgccacttacttttgccaacagggtaatacgcttccgtacacgttcggaggggggaccaagctggagatcacaaccacgacgccagcgccgcgaccaccaacaccggcgcccaccatcgcgtcgcagcccctgtccctgcgcccagaggcgtgccggccagcggcggggggcgcagtgcacacgagggggctggacttcgcctgtgatatctacatctgggcgcccttggccgggacttgtggggtccttctcctgtcactggttatcaccctttactgccggagggaccagaggctgccccccgatgcccacaagccccctgggggaggcagtttccggacccccatccaagaggagcaggccgacgcccactccaccctggccaagatcagagtgaagttcagcaggagcgcagacgcccccgcgtaccagcagggccagaaccagctctataacgagctcaatctaggacgaagagaggagtacgatgttttggacaagagacgtggccgggaccctgagatggggggaaagccgagaaggaagaaccctcaggaaggcctgtacaatgaactgcagaaagataagatggcggaggcctacagtgagattgggatgaaaggcgagcgccggaggggcaaggggcacgatggcctttaccagggtctcagtacagccaccaaggacacctacgacgcccttcacatgcaggccctgccccctcgcggctctggcgagggaaggggttccctgcttacttgcggcgacgtcgaagagaatcccggtccgatggccctcccagtaactgccctccttttgcccctcgcactccttcttcatgccgctcgccccaactgggtcaacgtgattagcgatttgaagaaaatcgaggaccttatacagtctatgcatattgacgctacactgtatactgagagtgatgtacacccgtcctgtaaggtaacggccatgaaatgctttcttctggagctccaggtcatcagcttggagtctggggacgcaagcatccacgatacggttgaaaacctcatcatccttgcgaacaactctctctcatctaatggaaacgttacagagagtgggtgtaaggagtgcgaagagttggaagaaaaaaacatcaaagaatttcttcaatccttcgttcacatagtgcaaatgttcattaacacgtccactaccacacccgccccgaggccacctacgccggcaccgactatcgccagtcaacccctctctctgcgccccgaggcttgccggcctgcggctggtggggcggtccacacccggggcctggattttgcgtgcgatatatacatctgggcacctcttgccggcacctgcggagtgctgcttctctcactcgttattacgctgtactgctaagcggccgcgtcgac

SEQ ID NO: 70 - protein, 589 aa, synthetic construct
MALPVTALLLPLALLLHAARPDYKDDDDKGGGGSGGGGSDIQMTQTTSSLSASLGDRVTISCRASQDISKYLNWYQQKPDGTVKLLIYHTSRLHSGVPSRFSGSGSGTDYSLTISNLEQEDIATYFCQQGNTLPYTFGGGTKLEITTTTPAPRPPTPAPTIASQPLSLRPEACRPAAGGAVHTRGLDFACDIYIWAPLAGTCGVLLLSLVITLYCRRDQRLPPDAHKPPGGGSFRTPIQEEQADAHSTLAKIRVKFSRSADAPAYQQGQNQLYNELNLGRREEYDVLDKRRGRDPEMGGKPRRKNPQEGLYNELQKDKMAEAYSEIGMKGERRRGKGHDGLYQGLSTATKDTYDALHMQALPPRGSGEGRGSLLTCGDVEENPGPMALPVTALLLPLALLLHAARPNWVNVISDLKKIEDLIQSMHIDATLYTESDVHPSCKVTAMKCFLLELQVISLESGDASIHDTVENLIILANNSLSSNGNVTESGCKECEELEEKNIKEFLQSFVHIVQMFINTSTTTPAPRPPTPAPTIASQPLSLRPEACRPAAGGAVHTRGLDFACDIYIWAPLAGTCGVLLLSLVITLYC

SEQ ID NO: 71 - DNA, 3347 bp, synthetic construct
  source 1..3347: mol_type = other DNA
ggatccgaattcgccgccaccatggccttaccagtgaccgccttgctcctgccgctggccttgctgctccacgccgccaggccggactacaaagacgatgacgataaaggcggtggtggctctggtggtggcggcagcgacatccagatgacacagactacatcctccctgtctgcctctctgggagacagagtcaccatcagttgcagggcaagtcaggacattagtaaatatttaaattggtatcagcagaaaccagatggaactgttaaactcctgatctaccatacatcaagattacactcaggagtcccatcaaggttcagtggcagtgggtctggaacagattattctctcaccattagcaacctggagcaagaagatattgccacttacttttgccaacagggtaatacgcttccgtacacgttcggaggggggaccaagctggagatcacaggtggcggtggctcgggcggtggtgggtcgggtggcggcggatctgaggtgaaactgcaggagtcaggacctggcctggtggcgccctcacagagcctgtccgtcacatgcactgtctcaggggtctcattacccgactatggtgtaagctggattcgccagcctccacgaaagggtctggagtggctgggagtaatatggggtagtgaaaccacatactataattcagctctcaaatccagactgaccatcatcaaggacaactccaagagccaagttttcttaaaaatgaacagtctgcaaactgatgacacagccatttactactgtgccaaacattattactacggtggtagctatgctatggactactggggccaaggaacctcagtcaccgtctcctcaaccacgacgccagcgccgcgaccaccaacaccggcgcccaccatcgcgtcgcagcccctgtccctgcgcccagaggcgtgccggccagcggcggggggcgcagtgcacacgagggggctggacttcgcctgtgatatctacatctgggcgcccttggccgggacttgtggggtccttctcctgtcactggttatcaccctttactgccggagggaccagaggctgccccccgatgcccacaagccccctgggggaggcagtttccggacccccatccaagaggagcaggccgacgcccactccaccctggccaagatcagagtgaagttcagcaggagcgcagacgcccccgcgtaccagcagggccagaaccagctctataacgagctcaatctaggacgaagagaggagtacgatgttttggacaagagacgtggccgggaccctgagatggggggaaagccgagaaggaagaaccctcaggaaggcctgtacaatgaactgcagaaagataagatggcggaggcctacagtgagattgggatgaaaggcgagcgccggaggggcaaggggcacgatggcctttaccagggtctcagtacagccaccaaggacacctacgacgcccttcacatgcaggccctgccccctcgcggctctggcgagggaaggggttccctgcttacttgcggcgacgtcgaagagaatcccggtccgatggccctcccagtaactgccctccttttgcccctcgcactccttcttcatgccgctcgccccaactgggtcaacgtgattagcgatttgaagaaaatcgaggaccttatacagtctatgcatattgacgctacactgtatactgagagtgatgtacacccgtcctgtaaggtaacggccatgaaatgctttcttctggagctccaggtcatcagcttggagtctggggacgcaagcatccacgatacggttgaaaacctcatcatccttgcgaacaactctctctcatctaatggaaacgttacagagagtgggtgtaaggagtgcgaagagttggaagaaaaaaacatcaaagaatttcttcaatccttcgttcacatagtgcaaatgttcattaacacgtccactaccacacccgccccgaggccacctacgccggcaccgactatcgccagtcaacccctctctctgcgccccgaggcttgccggcctgcggctggtggggcggtccacacccggggcctggattttgcgtgcgatatatacatctgggcacctcttgccggcacctgcggagtgctgcttctctcactcgttattacgctgtactgcggcagcggcgccacaaacttctctctgctaaagcaagcaggtgatgttgaagaaaaccccgggcctatgcttctcctggtgacaagccttctgctctgtgagttaccacacccagcattcctcctgatcccacgcaaagtgtgtaacggaataggtattggtgaatttaaagactcactctccataaatgctacgaatattaaacacttcaaaaactgcacctccatcagtggcgatctccacatcctgccggtggcatttaggggtgactccttcacacatactcctcctctggatccacaggaactggatattctgaaaaccgtaaaggaaatcacagggtttttgctgattcaggcttggcctgaaaacaggacggacctccatgcctttgagaacctagaaatcatacgcggcaggaccaagcaacatggtcagttttctcttgcagtcgtcagcctgaacataacatccttgggattacgctccctcaaggagataagtgatggagatgtgataatttcaggaaacaaaaatttgtgctatgcaaatacaataaactggaaaaaactgtttgggacctccggtcagaaaaccaaaattataagcaacagaggtgaaaacagctgcaaggccacaggccaggtctgccatgccttgtgctcccccgagggctgctggggcccggagcccagggactgcgtctcttgccggaatgtcagccgaggcagggaatgcgtggacaagtgcaaccttctggagggtgagccaagggagtttgtggagaactctgagtgcatacagtgccacccagagtgcctgcctcaggccatgaacatcacctgcacaggacggggaccagacaactgtatccagtgtgcccactacattgacggcccccactgcgtcaagacctgcccggcaggagtcatgggagaaaacaacaccctggtctggaagtacgcagacgccggccatgtgtgccacctgtgccatccaaactgcacctacggatgcactgggccaggtcttgaaggctgtccaacgaatgggcctaagatcccgtccatcgccactgggatggtgggggccctcctcttgctgctggtggtggccctggggatcggcctcttcatgtgagcggccgcgtcgac

SEQ ID NO: 72 - protein, 1103 aa, synthetic construct
MALPVTALLLPLALLLHAARPDYKDDDDKGGGGSGGGGSDIQMTQTTSSLSASLGDRVTISCRASQDISKYLNWYQQKPDGTVKLLIYHTSRLHSGVPSRFSGSGSGTDYSLTISNLEQEDIATYFCQQGNTLPYTFGGGTKLEITGGGGSGGGGSGGGGSEVKLQESGPGLVAPSQSLSVTCTVSGVSLPDYGVSWIRQPPRKGLEWLGVIWGSETTYYNSALKSRLTIIKDNSKSQVFLKMNSLQTDDTAIYYCAKHYYYGGSYAMDYWGQGTSVTVSSTTTPAPRPPTPAPTIASQPLSLRPEACRPAAGGAVHTRGLDFACDIYIWAPLAGTCGVLLLSLVITLYCRRDQRLPPDAHKPPGGGSFRTPIQEEQADAHSTLAKIRVKFSRSADAPAYQQGQNQLYNELNLGRREEYDVLDKRRGRDPEMGGKPRRKNPQEGLYNELQKDKMAEAYSEIGMKGERRRGKGHDGLYQGLSTATKDTYDALHMQALPPRGSGEGRGSLLTCGDVEENPGPMALPVTALLLPLALLLHAARPNWVNVISDLKKIEDLIQSMHIDATLYTESDVHPSCKVTAMKCFLLELQVISLESGDASIHDTVENLIILANNSLSSNGNVTESGCKECEELEEKNIKEFLQSFVHIVQMFINTSTTTPAPRPPTPAPTIASQPLSLRPEACRPAAGGAVHTRGLDFACDIYIWAPLAGTCGVLLLSLVITLYCGSGATNFSLLKQAGDVEENPGPMLLLVTSLLLCELPHPAFLLIPRKVCNGIGIGEFKDSLSINATNIKHFKNCTSISGDLHILPVAFRGDSFTHTPPLDPQELDILKTVKEITGFLLIQAWPENRTDLHAFENLEIIRGRTKQHGQFSLAVVSLNITSLGLRSLKEISDGDVIISGNKNLCYANTINWKKLFGTSGQKTKIISNRGENSCKATGQVCHALCSPEGCWGPEPRDCVSCRNVSRGRECVDKCNLLEGEPREFVENSECIQCHPECLPQAMNITCTGRGPDNCIQCAHYIDGPHCVKTCPAGVMGENNTLVWKYADAGHVCHLCHPNCTYGCTGPGLEGCPTNGPKIPSIATGMVGALLLLLVVALGIGLFM

SEQ ID NO: 73 - DNA, 1844 bp, synthetic construct
  source 1..1844: mol_type = other DNA
ggatccgaattcgccgccaccatggccttaccagtgaccgccttgctcctgccgctggccttgctgctccacgccgccaggccggactacaaagacgatgacgataaaggcggtggtggctctggtggtggcggcagcgaggtgaaactgcaggagtcaggacctggcctggtggcgccctcacagagcctgtccgtcacatgcactgtctcaggggtctcattacccgactatggtgtaagctggattcgccagcctccacgaaagggtctggagtggctgggagtaatatggggtagtgaaaccacatactataattcagctctcaaatccagactgaccatcatcaaggacaactccaagagccaagttttcttaaaaatgaacagtctgcaaactgatgacacagccatttactactgtgccaaacattattactacggtggtagctatgctatggactactggggccaaggaacctcagtcaccgtctcctcaaccacgacgccagcgccgcgaccaccaacaccggcgcccaccatcgcgtcgcagcccctgtccctgcgcccagaggcgtgccggccagcggcggggggcgcagtgcacacgagggggctggacttcgcctgtgatatctacatctgggcgcccttggccgggacttgtggggtccttctcctgtcactggttatcaccctttactgccggagggaccagaggctgccccccgatgcccacaagccccctgggggaggcagtttccggacccccatccaagaggagcaggccgacgcccactccaccctggccaagatcagagtgaagttcagcaggagcgcagacgcccccgcgtaccagcagggccagaaccagctctataacgagctcaatctaggacgaagagaggagtacgatgttttggacaagagacgtggccgggaccctgagatggggggaaagccgagaaggaagaaccctcaggaaggcctgtacaatgaactgcagaaagataagatggcggaggcctacagtgagattgggatgaaaggcgagcgccggaggggcaaggggcacgatggcctttaccagggtctcagtacagccaccaaggacacctacgacgcccttcacatgcaggccctgccccctcgcggctctggcgagggaaggggttccctgcttacttgcggcgacgtcgaagagaatcccggtccgatggccctcccagtaactgccctccttttgcccctcgcactccttcttcatgccgctcgccccaactgggtcaacgtgattagcgatttgaagaaaatcgaggaccttatacagtctatgcatattgacgctacactgtatactgagagtgatgtacacccgtcctgtaaggtaacggccatgaaatgctttcttctggagctccaggtcatcagcttggagtctggggacgcaagcatccacgatacggttgaaaacctcatcatccttgcgaacaactctctctcatctaatggaaacgttacagagagtgggtgtaaggagtgcgaagagttggaagaaaaaaacatcaaagaatttcttcaatccttcgttcacatagtgcaaatgttcattaacacgtccactaccacacccgccccgaggccacctacgccggcaccgactatcgccagtcaacccctctctctgcgccccgaggcttgccggcctgcggctggtggggcggtccacacccggggcctggattttgcgtgcgatatatacatctgggcacctcttgccggcacctgcggagtgctgcttctctcactcgttattacgctgtactgctaagcggccgcgtcgac

SEQ ID NO: 74 - protein, 602 aa, synthetic construct
MALPVTALLLPLALLLHAARPDYKDDDDKGGGGSGGGGSEVKLQESGPGLVAPSQSLSVTCTVSGVSLPDYGVSWIRQPPRKGLEWLGVIWGSETTYYNSALKSRLTIIKDNSKSQVFLKMNSLQTDDTAIYYCAKHYYYGGSYAMDYWGQGTSVTVSSTTTPAPRPPTPAPTIASQPLSLRPEACRPAAGGAVHTRGLDFACDIYIWAPLAGTCGVLLLSLVITLYCRRDQRLPPDAHKPPGGGSFRTPIQEEQADAHSTLAKIRVKFSRSADAPAYQQGQNQLYNELNLGRREEYDVLDKRRGRDPEMGGKPRRKNPQEGLYNELQKDKMAEAYSEIGMKGERRRGKGHDGLYQGLSTATKDTYDALHMQALPPRGSGEGRGSLLTCGDVEENPGPMALPVTALLLPLALLLHAARPNWVNVISDLKKIEDLIQSMHIDATLYTESDVHPSCKVTAMKCFLLELQVISLESGDASIHDTVENLIILANNSLSSNGNVTESGCKECEELEEKNIKEFLQSFVHIVQMFINTSTTTPAPRPPTPAPTIASQPLSLRPEACRPAAGGAVHTRGLDFACDIYIWAPLAGTCGVLLLSLVITLYC

SEQ ID NO: 75 - DNA, 2243 bp, synthetic construct
  source 1..2243: mol_type = other DNA
ggatccgaattcgccgccaccatggccttaccagtgaccgccttgctcctgccgctggccttgctgctccacgccgccaggccggactacaaagacgatgacgataaaggcggtggtggctctggtggtggcggcagcgacatccagatgacacagactacatcctccctgtctgcctctctgggagacagagtcaccatcagttgcagggcaagtcaggacattagtaaatatttaaattggtatcagcagaaaccagatggaactgttaaactcctgatctaccatacatcaagattacactcaggagtcccatcaaggttcagtggcagtgggtctggaacagattattctctcaccattagcaacctggagcaagaagatattgccacttacttttgccaacagggtaatacgcttccgtacacgttcggaggggggaccaagctggagatcacaggtggcggtggctcgggcggtggtgggtcgggtggcggcggatctgaggtgaaactgcaggagtcaggacctggcctggtggcgccctcacagagcctgtccgtcacatgcactgtctcaggggtctcattacccgactatggtgtaagctggattcgccagcctccacgaaagggtctggagtggctgggagtaatatggggtagtgaaaccacatactataattcagctctcaaatccagactgaccatcatcaaggacaactccaagagccaagttttcttaaaaatgaacagtctgcaaactgatgacacagccatttactactgtgccaaacattattactacggtggtagctatgctatggactactggggccaaggaacctcagtcaccgtctcctcaaccacgacgccagcgccgcgaccaccaacaccggcgcccaccatcgcgtcgcagcccctgtccctgcgcccagaggcgtgccggccagcggcggggggcgcagtgcacacgagggggctggacttcgcctgtgatatctacatctgggcgcccttggccgggacttgtggggtccttctcctgtcactggttatcaccctttactgccaacgaaggaaatatagatcaaacaaaggagaaagtcctgtggagcctgcagagccttgtcgttacagctgccccagggaggaggagggcagcaccatccccatccaggaggattaccgaaaaccggagcctgcctgctcccccagagtgaagttcagcaggagcgcagacgcccccgcgtaccagcagggccagaaccagctctataacgagctcaatctaggacgaagagaggagtacgatgttttggacaagagacgtggccgggaccctgagatggggggaaagccgagaaggaagaaccctcaggaaggcctgtacaatgaactgcagaaagataagatggcggaggcctacagtgagattgggatgaaaggcgagcgccggaggggcaaggggcacgatggcctttaccagggtctcagtacagccaccaaggacacctacgacgcccttcacatgcaggccctgccccctcgcggctctggcgagggaaggggttccctgcttacttgcggcgacgtcgaagagaatcccggtccgatggccctcccagtaactgccctccttttgcccctcgcactccttcttcatgccgctcgccccaactgggtcaacgtgattagcgatttgaagaaaatcgaggaccttatacagtctatgcatattgacgctacactgtatactgagagtgatgtacacccgtcctgtaaggtaacggccatgaaatgctttcttctggagctccaggtcatcagcttggagtctggggacgcaagcatccacgatacggttgaaaacctcatcatccttgcgaacaactctctctcatctaatggaaacgttacagagagtgggtgtaaggagtgcgaagagttggaagaaaaaaacatcaaagaatttcttcaatccttcgttcacatagtgcaaatgttcattaacacgtccactaccacacccgccccgaggccacctacgccggcaccgactatcgccagtcaacccctctctctgcgccccgaggcttgccggcctgcggctggtggggcggtccacacccggggcctggattttgcgtgcgatatatacatctgggcacctcttgccggcacctgcggagtgctgcttctctcactcgttattacgctgtactgctaagcggccgcgtcgac

SEQ ID NO: 76 - protein, 735 aa, synthetic construct
MALPVTALLLPLALLLHAARPDYKDDDDKGGGGSGGGGSDIQMTQTTSSLSASLGDRVTISCRASQDISKYLNWYQQKPDGTVKLLIYHTSRLHSGVPSRFSGSGSGTDYSLTISNLEQEDIATYFCQQGNTLPYTFGGGTKLEITGGGGSGGGGSGGGGSEVKLQESGPGLVAPSQSLSVTCTVSGVSLPDYGVSWIRQPPRKGLEWLGVIWGSETTYYNSALKSRLTIIKDNSKSQVFLKMNSLQTDDTAIYYCAKHYYYGGSYAMDYWGQGTSVTVSSTTTPAPRPPTPAPTIASQPLSLRPEACRPAAGGAVHTRGLDFACDIYIWAPLAGTCGVLLLSLVITLYCQRRKYRSNKGESPVEPAEPCRYSCPREEEGSTIPIQEDYRKPEPACSPRVKFSRSADAPAYQQGQNQLYNELNLGRREEYDVLDKRRGRDPEMGGKPRRKNPQEGLYNELQKDKMAEAYSEIGMKGERRRGKGHDGLYQGLSTATKDTYDALHMQALPPRGSGEGRGSLLTCGDVEENPGPMALPVTALLLPLALLLHAARPNWVNVISDLKKIEDLIQSMHIDATLYTESDVHPSCKVTAMKCFLLELQVISLESGDASIHDTVENLIILANNSLSSNGNVTESGCKECEELEEKNIKEFLQSFVHIVQMFINTSTTTPAPRPPTPAPTIASQPLSLRPEACRPAAGGAVHTRGLDFACDIYIWAPLAGTCGVLLLSLVITLYC

SEQ ID NO: 77 - DNA, 2150 bp, synthetic construct
  source 1..2150: mol_type = other DNA
ggatccgaattcgccgccaccatggccttaccagtgaccgccttgctcctgccgctggccttgctgctccacgccgccaggccggactacaaagacgatgacgataaaggcggtggtggctctggtggtggcggcagcgacatccagatgacacagactacatcctccctgtctgcctctctgggagacagagtcaccatcagttgcagggcaagtcaggacattagtaaatatttaaattggtatcagcagaaaccagatggaactgttaaactcctgatctaccatacatcaagattacactcaggagtcccatcaaggttcagtggcagtgggtctggaacagattattctctcaccattagcaacctggagcaagaagatattgccacttacttttgccaacagggtaatacgcttccgtacacgttcggaggggggaccaagctggagatcacaggtggcggtggctcgggcggtggtgggtcgggtggcggcggatctgaggtgaaactgcaggagtcaggacctggcctggtggcgccctcacagagcctgtccgtcacatgcactgtctcaggggtctcattacccgactatggtgtaagctggattcgccagcctccacgaaagggtctggagtggctgggagtaatatggggtagtgaaaccacatactataattcagctctcaaatccagactgaccatcatcaaggacaactccaagagccaagttttcttaaaaatgaacagtctgcaaactgatgacacagccatttactactgtgccaaacattattactacggtggtagctatgctatggactactggggccaaggaacctcagtcaccgtctcctcaaccacgacgccagcgccgcgaccaccaacaccggcgcccaccatcgcgtcgcagcccctgtccctgcgcccagaggcgtgccggccagcggcggggggcgcagtgcacacgagggggctggacttcgcctgtgatatctacatctgggcgcccttggccgggacttgtggggtccttctcctgtcactggttatcaccctttactgcatgccggaggagggttcgggctgctcggtgcggcgcaggccctatgggtgcagagtgaagttcagcaggagcgcagacgcccccgcgtaccagcagggccagaaccagctctataacgagctcaatctaggacgaagagaggagtacgatgttttggacaagagacgtggccgggaccctgagatggggggaaagccgagaaggaagaaccctcaggaaggcctgtacaatgaactgcagaaagataagatggcggaggcctacagtgagattgggatgaaaggcgagcgccggaggggcaaggggcacgatggcctttaccagggtctcagtacagccaccaaggacacctacgacgcccttcacatgcaggccctgccccctcgcggctctggcgagggaaggggttccctgcttacttgcggcgacgtcgaagagaatcccggtccgatggccctcccagtaactgccctccttttgcccctcgcactccttcttcatgccgctcgccccaactgggtcaacgtgattagcgatttgaagaaaatcgaggaccttatacagtctatgcatattgacgctacactgtatactgagagtgatgtacacccgtcctgtaaggtaacggccatgaaatgctttcttctggagctccaggtcatcagcttggagtctggggacgcaagcatccacgatacggttgaaaacctcatcatccttgcgaacaactctctctcatctaatggaaacgttacagagagtgggtgtaaggagtgcgaagagttggaagaaaaaaacatcaaagaatttcttcaatccttcgttcacatagtgcaaatgttcattaacacgtccactaccacacccgccccgaggccacctacgccggcaccgactatcgccagtcaacccctctctctgcgccccgaggcttgccggcctgcggctggtggggcggtccacacccggggcctggattttgcgtgcgatatatacatctgggcacctcttgccggcacctgcggagtgctgcttctctcactcgttattacgctgtactgctaagcggccgcgtcgac

SEQ ID NO: 78 - protein, 704 aa, synthetic construct
MALPVTALLLPLALLLHAARPDYKDDDDKGGGGSGGGGSDIQMTQTTSSLSASLGDRVTISCRASQDISKYLNWYQQKPDGTVKLLIYHTSRLHSGVPSRFSGSGSGTDYSLTISNLEQEDIATYFCQQGNTLPYTFGGGTKLEITGGGGSGGGGSGGGGSEVKLQESGPGLVAPSQSLSVTCTVSGVSLPDYGVSWIRQPPRKGLEWLGVIWGSETTYYNSALKSRLTIIKDNSKSQVFLKMNSLQTDDTAIYYCAKHYYYGGSYAMDYWGQGTSVTVSSTTTPAPRPPTPAPTIASQPLSLRPEACRPAAGGAVHTRGLDFACDIYIWAPLAGTCGVLLLSLVITLYCMPEEGSGCSVRRRPYGCRVKFSRSADAPAYQQGQNQLYNELNLGRREEYDVLDKRRGRDPEMGGKPRRKNPQEGLYNELQKDKMAEAYSEIGMKGERRRGKGHDGLYQGLSTATKDTYDALHMQALPPRGSGEGRGSLLTCGDVEENPGPMALPVTALLLPLALLLHAARPNWVNVISDLKKIEDLIQSMHIDATLYTESDVHPSCKVTAMKCFLLELQVISLESGDASIHDTVENLIILANNSLSSNGNVTESGCKECEELEEKNIKEFLQSFVHIVQMFINTSTTTPAPRPPTPAPTIASQPLSLRPEACRPAAGGAVHTRGLDFACDIYIWAPLAGTCGVLLLSLVITLYC

SEQ ID NO: 79 - DNA, 2234 bp, synthetic construct
  source 1..2234: mol_type = other DNA
ggatccgaattcgccgccaccatggccttaccagtgaccgccttgctcctgccgctggccttgctgctccacgccgccaggccggactacaaagacgatgacgataaaggcggtggtggctctggtggtggcggcagcgacatccagatgacacagactacatcctccctgtctgcctctctgggagacagagtcaccatcagttgcagggcaagtcaggacattagtaaatatttaaattggtatcagcagaaaccagatggaactgttaaactcctgatctaccatacatcaagattacactcaggagtcccatcaaggttcagtggcagtgggtctggaacagattattctctcaccattagcaacctggagcaagaagatattgccacttacttttgccaacagggtaatacgcttccgtacacgttcggaggggggaccaagctggagatcacaggtggcggtggctcgggcggtggtgggtcgggtggcggcggatctgaggtgaaactgcaggagtcaggacctggcctggtggcgccctcacagagcctgtccgtcacatgcactgtctcaggggtctcattacccgactatggtgtaagctggattcgccagcctccacgaaagggtctggagtggctgggagtaatatggggtagtgaaaccacatactataattcagctctcaaatccagactgaccatcatcaaggacaactccaagagccaagttttcttaaaaatgaacagtctgcaaactgatgacacagccatttactactgtgccaaacattattactacggtggtagctatgctatggactactggggccaaggaacctcagtcaccgtctcctcaaccacgacgccagcgccgcgaccaccaacaccggcgcccaccatcgcgtcgcagcccctgtccctgcgcccagaggcgtgccggccagcggcggggggcgcagtgcacacgagggggctggacttcgcctgtgatatctacatctgggcgcccttggccgggacttgtggggtccttctcctgtcactggttatcaccctttactgcatggaccaacaagcaatatatgctgagttaaacttacccacagactcaggcccagaaagttcttcaccttcatctcttcctcgggatgtctgtcagggttcaccttggcatcaatttgccctgaaacttagctgtagagtgaagttcagcaggagcgcagacgcccccgcgtaccagcagggccagaaccagctctataacgagctcaatctaggacgaagagaggagtacgatgttttggacaagagacgtggccgggaccctgagatggggggaaagccgagaaggaagaaccctcaggaaggcctgtacaatgaactgcagaaagataagatggcggaggcctacagtgagattgggatgaaaggcgagcgccggaggggcaaggggcacgatggcctttaccagggtctcagtacagccaccaaggacacctacgacgcccttcacatgcaggccctgccccctcgcggctctggcgagggaaggggttccctgcttacttgcggcgacgtcgaagagaatcccggtccgatggccctcccagtaactgccctccttttgcccctcgcactccttcttcatgccgctcgccccaactgggtcaacgtgattagcgatttgaagaaaatcgaggaccttatacagtctatgcatattgacgctacactgtatactgagagtgatgtacacccgtcctgtaaggtaacggccatgaaatgctttcttctggagctccaggtcatcagcttggagtctggggacgcaagcatccacgatacggttgaaaacctcatcatccttgcgaacaactctctctcatctaatggaaacgttacagagagtgggtgtaaggagtgcgaagagttggaagaaaaaaacatcaaagaatttcttcaatccttcgttcacatagtgcaaatgttcattaacacgtccactaccacacccgccccgaggccacctacgccggcaccgactatcgccagtcaacccctctctctgcgccccgaggcttgccggcctgcggctggtggggcggtccacacccggggcctggattttgcgtgcgatatatacatctgggcacctcttgccggcacctgcggagtgctgcttctctcactcgttattacgctgtactgctaagcggccgcgtcgac

SEQ ID NO: 80 - protein, 732 aa, synthetic construct
MALPVTALLLPLALLLHAARPDYKDDDDKGGGGSGGGGSDIQMTQTTSSLSASLGDRVTISCRASQDISKYLNWYQQKPDGTVKLLIYHTSRLHSGVPSRFSGSGSGTDYSLTISNLEQEDIATYFCQQGNTLPYTFGGGTKLEITGGGGSGGGGSGGGGSEVKLQESGPGLVAPSQSLSVTCTVSGVSLPDYGVSWIRQPPRKGLEWLGVIWGSETTYYNSALKSRLTIIKDNSKSQVFLKMNSLQTDDTAIYYCAKHYYYGGSYAMDYWGQGTSVTVSSTTTPAPRPPTPAPTIASQPLSLRPEACRPAAGGAVHTRGLDFACDIYIWAPLAGTCGVLLLSLVITLYCMDQQAIYAELNLPTDSGPESSSPSSLPRDVCQGSPWHQFALKLSCRVKFSRSADAPAYQQGQNQLYNELNLGRREEYDVLDKRRGRDPEMGGKPRRKNPQEGLYNELQKDKMAEAYSEIGMKGERRRGKGHDGLYQGLSTATKDTYDALHMQALPPRGSGEGRGSLLTCGDVEENPGPMALPVTALLLPLALLLHAARPNWVNVISDLKKIEDLIQSMHIDATLYTESDVHPSCKVTAMKCFLLELQVISLESGDASIHDTVENLIILANNSLSSNGNVTESGCKECEELEEKNIKEFLQSFVHIVQMFINTSTTTPAPRPPTPAPTIASQPLSLRPEACRPAAGGAVHTRGLDFACDIYIWAPLAGTCGVLLLSLVITLYC

SEQ ID NO: 81 - DNA, 2165 bp, synthetic construct
  source 1..2165: mol_type = other DNA
ggatccgaattcgccgccaccatggccttaccagtgaccgccttgctcctgccgctggccttgctgctccacgccgccaggccggactacaaagacgatgacgataaaggcggtggtggctctggtggtggcggcagcgacatccagatgacacagactacatcctccctgtctgcctctctgggagacagagtcaccatcagttgcagggcaagtcaggacattagtaaatatttaaattggtatcagcagaaaccagatggaactgttaaactcctgatctaccatacatcaagattacactcaggagtcccatcaaggttcagtggcagtgggtctggaacagattattctctcaccattagcaacctggagcaagaagatattgccacttacttttgccaacagggtaatacgcttccgtacacgttcggaggggggaccaagctggagatcacaggtggcggtggctcgggcggtggtgggtcgggtggcggcggatctgaggtgaaactgcaggagtcaggacctggcctggtggcgccctcacagagcctgtccgtcacatgcactgtctcaggggtctcattacccgactatggtgtaagctggattcgccagcctccacgaaagggtctggagtggctgggagtaatatggggtagtgaaaccacatactataattcagctctcaaatccagactgaccatcatcaaggacaactccaagagccaagttttcttaaaaatgaacagtctgcaaactgatgacacagccatttactactgtgccaaacattattactacggtggtagctatgctatggactactggggccaaggaacctcagtcaccgtctcctcaaccacgacgccagcgccgcgaccaccaacaccggcgcccaccatcgcgtcgcagcccctgtccctgcgcccagaggcgtgccggccagcggcggggggcgcagtgcacacgagggggctggacttcgcctgtgatatctacatctgggcgcccttggccgggacttgtggggtccttctcctgtcactggttatcaccctttactgcatgatcgaaacatacaaccaaacttctccccgatctgcggccactggactgcccatcagcatgaaaagagtgaagttcagcaggagcgcagacgcccccgcgtaccagcagggccagaaccagctctataacgagctcaatctaggacgaagagaggagtacgatgttttggacaagagacgtggccgggaccctgagatggggggaaagccgagaaggaagaaccctcaggaaggcctgtacaatgaactgcagaaagataagatggcggaggcctacagtgagattgggatgaaaggcgagcgccggaggggcaaggggcacgatggcctttaccagggtctcagtacagccaccaaggacacctacgacgcccttcacatgcaggccctgccccctcgcggctctggcgagggaaggggttccctgcttacttgcggcgacgtcgaagagaatcccggtccgatggccctcccagtaactgccctccttttgcccctcgcactccttcttcatgccgctcgccccaactgggtcaacgtgattagcgatttgaagaaaatcgaggaccttatacagtctatgcatattgacgctacactgtatactgagagtgatgtacacccgtcctgtaaggtaacggccatgaaatgctttcttctggagctccaggtcatcagcttggagtctggggacgcaagcatccacgatacggttgaaaacctcatcatccttgcgaacaactctctctcatctaatggaaacgttacagagagtgggtgtaaggagtgcgaagagttggaagaaaaaaacatcaaagaatttcttcaatccttcgttcacatagtgcaaatgttcattaacacgtccactaccacacccgccccgaggccacctacgccggcaccgactatcgccagtcaacccctctctctgcgccccgaggcttgccggcctgcggctggtggggcggtccacacccggggcctggattttgcgtgcgatatatacatctgggcacctcttgccggcacctgcggagtgctgcttctctcactcgttattacgctgtactgctaagcggccgcgtcgac

SEQ ID NO: 82 - protein, 709 aa, synthetic construct
MALPVTALLLPLALLLHAARPDYKDDDDKGGGGSGGGGSDIQMTQTTSSLSASLGDRVTISCRASQDISKYLNWYQQKPDGTVKLLIYHTSRLHSGVPSRFSGSGSGTDYSLTISNLEQEDIATYFCQQGNTLPYTFGGGTKLEITGGGGSGGGGSGGGGSEVKLQESGPGLVAPSQSLSVTCTVSGVSLPDYGVSWIRQPPRKGLEWLGVIWGSETTYYNSALKSRLTIIKDNSKSQVFLKMNSLQTDDTAIYYCAKHYYYGGSYAMDYWGQGTSVTVSSTTTPAPRPPTPAPTIASQPLSLRPEACRPAAGGAVHTRGLDFACDIYIWAPLAGTCGVLLLSLVITLYCMIETYNQTSPRSAATGLPISMKRVKFSRSADAPAYQQGQNQLYNELNLGRREEYDVLDKRRGRDPEMGGKPRRKNPQEGLYNELQKDKMAEAYSEIGMKGERRRGKGHDGLYQGLSTATKDTYDALHMQALPPRGSGEGRGSLLTCGDVEENPGPMALPVTALLLPLALLLHAARPNWVNVISDLKKIEDLIQSMHIDATLYTESDVHPSCKVTAMKCFLLELQVISLESGDASIHDTVENLIILANNSLSSNGNVTESGCKECEELEEKNIKEFLQSFVHIVQMFINTSTTTPAPRPPTPAPTIASQPLSLRPEACRPAAGGAVHTRGLDFACDIYIWAPLAGTCGVLLLSLVITLYC

SEQ ID NO: 83 - DNA, 2315 bp, synthetic construct
  source 1..2315: mol_type = other DNA
ggatccgaattcgccgccaccatggccttaccagtgaccgccttgctcctgccgctggccttgctgctccacgccgccaggccggactacaaagacgatgacgataaaggcggtggtggctctggtggtggcggcagcgacatccagatgacacagactacatcctccctgtctgcctctctgggagacagagtcaccatcagttgcagggcaagtcaggacattagtaaatatttaaattggtatcagcagaaaccagatggaactgttaaactcctgatctaccatacatcaagattacactcaggagtcccatcaaggttcagtggcagtgggtctggaacagattattctctcaccattagcaacctggagcaagaagatattgccacttacttttgccaacagggtaatacgcttccgtacacgttcggaggggggaccaagctggagatcacaggtggcggtggctcgggcggtggtgggtcgggtggcggcggatctgaggtgaaactgcaggagtcaggacctggcctggtggcgccctcacagagcctgtccgtcacatgcactgtctcaggggtctcattacccgactatggtgtaagctggattcgccagcctccacgaaagggtctggagtggctgggagtaatatggggtagtgaaaccacatactataattcagctctcaaatccagactgaccatcatcaaggacaactccaagagccaagttttcttaaaaatgaacagtctgcaaactgatgacacagccatttactactgtgccaaacattattactacggtggtagctatgctatggactactggggccaaggaacctcagtcaccgtctcctcaaccacgacgccagcgccgcgaccaccaacaccggcgcccaccatcgcgtcgcagcccctgtccctgcgcccagaggcgtgccggccagcggcggggggcgcagtgcacacgagggggctggacttcgcctgtgatatctacatctgggcgcccttggccgggacttgtggggtccttctcctgtcactggttatcaccctttactgcaacagtcgaagaaggtgtgggcagaagaaaaagctagtgatcaacagtggcaatggagctgtggaggacagaaagccaagtggactcaacggagaggccagcaagtctcaggaaatggtgcatttggtgaacaaggagtcgtcagaaactccagaccagtttatgacagctgatgagacaaggaacctgcagaatgtggacatgaagattggggtgagagtgaagttcagcaggagcgcagacgcccccgcgtaccagcagggccagaaccagctctataacgagctcaatctaggacgaagagaggagtacgatgttttggacaagagacgtggccgggaccctgagatggggggaaagccgagaaggaagaaccctcaggaaggcctgtacaatgaactgcagaaagataagatggcggaggcctacagtgagattgggatgaaaggcgagcgccggaggggcaaggggcacgatggcctttaccagggtctcagtacagccaccaaggacacctacgacgcccttcacatgcaggccctgccccctcgcggctctggcgagggaaggggttccctgcttacttgcggcgacgtcgaagagaatcccggtccgatggccctcccagtaactgccctccttttgcccctcgcactccttcttcatgccgctcgccccaactgggtcaacgtgattagcgatttgaagaaaatcgaggaccttatacagtctatgcatattgacgctacactgtatactgagagtgatgtacacccgtcctgtaaggtaacggccatgaaatgctttcttctggagctccaggtcatcagcttggagtctggggacgcaagcatccacgatacggttgaaaacctcatcatccttgcgaacaactctctctcatctaatggaaacgttacagagagtgggtgtaaggagtgcgaagagttggaagaaaaaaacatcaaagaatttcttcaatccttcgttcacatagtgcaaatgttcattaacacgtccactaccacacccgccccgaggccacctacgccggcaccgactatcgccagtcaacccctctctctgcgccccgaggcttgccggcctgcggctggtggggcggtccacacccggggcctggattttgcgtgcgatatatacatctgggcacctcttgccggcacctgcggagtgctgcttctctcactcgttattacgctgtactgctaagcggccgcgtcgac

SEQ ID NO: 84 - protein, 759 aa, synthetic construct
MALPVTALLLPLALLLHAARPDYKDDDDKGGGGSGGGGSDIQMTQTTSSLSASLGDRVTISCRASQDISKYLNWYQQKPDGTVKLLIYHTSRLHSGVPSRFSGSGSGTDYSLTISNLEQEDIATYFCQQGNTLPYTFGGGTKLEITGGGGSGGGGSGGGGSEVKLQESGPGLVAPSQSLSVTCTVSGVSLPDYGVSWIRQPPRKGLEWLGVIWGSETTYYNSALKSRLTIIKDNSKSQVFLKMNSLQTDDTAIYYCAKHYYYGGSYAMDYWGQGTSVTVSSTTTPAPRPPTPAPTIASQPLSLRPEACRPAAGGAVHTRGLDFACDIYIWAPLAGTCGVLLLSLVITLYCNSRRRCGQKKKLVINSGNGAVEDRKPSGLNGEASKSQEMVHLVNKESSETPDQFMTADETRNLQNVDMKIGVRVKFSRSADAPAYQQGQNQLYNELNLGRREEYDVLDKRRGRDPEMGGKPRRKNPQEGLYNELQKDKMAEAYSEIGMKGERRRGKGHDGLYQGLSTATKDTYDALHMQALPPRGSGEGRGSLLTCGDVEENPGPMALPVTALLLPLALLLHAARPNWVNVISDLKKIEDLIQSMHIDATLYTESDVHPSCKVTAMKCFLLELQVISLESGDASIHDTVENLIILANNSLSSNGNVTESGCKECEELEEKNIKEFLQSFVHIVQMFINTSTTTPAPRPPTPAPTIASQPLSLRPEACRPAAGGAVHTRGLDFACDIYIWAPLAGTCGVLLLSLVITLYC

SEQ ID NO: 85 - DNA, 1490 bp, synthetic construct
  source 1..1490: mol_type = other DNA
gaattcgccgccaccatggccttaccagtgaccgccttgctcctgccgctggccttgctgctccacgccgccaggccggacatccagatgacacagactacatcctccctgtctgcctctctgggagacagagtcaccatcagttgcagggcaagtcaggacattagtaaatatttaaattggtatcagcagaaaccagatggaactgttaaactcctgatctaccatacatcaagattacactcaggagtcccatcaaggttcagtggcagtgggtctggaacagattattctctcaccattagcaacctggagcaagaagatattgccacttacttttgccaacagggtaatacgcttccgtacacgttcggaggggggaccaagctggagatcacaggtggcggtggctcgggcggtggtgggtcgggtggcggcggatctgaggtgaaactgcaggagtcaggacctggcctggtggcgccctcacagagcctgtccgtcacatgcactgtctcaggggtctcattacccgactatggtgtaagctggattcgccagcctccacgaaagggtctggagtggctgggagtaatatggggtagtgaaaccacatactataattcagctctcaaatccagactgaccatcatcaaggacaactccaagagccaagttttcttaaaaatgaacagtctgcaaactgatgacacagccatttactactgtgccaaacattattactacggtggtagctatgctatggactactggggccaaggaacctcagtcaccgtctcctcaaccacgacgccagcgccgcgaccaccaacaccggcgcccaccatcgcgtcgcagcccctgtccctgcgcccagaggcgtgccggccagcggcggggggcgcagtgcacacgagggggctggacttcgcctgtgatatctacatctgggcgcccttggccgggacttgtggggtccttctcctgtcactggttatcaccctttactgcaaacggggcagaaagaaactcctgtatatattcaaacaaccatttatgagaccagtacaaactactcaagaggaagatggctgtagctgccgatttccagaagaagaagaaggaggatgtgaactgagagtgaagttcagcaggagcgcagacgcccccgcgtaccagcagggccagaaccagctctataacgagctcaatctaggacgaagagaggagtacgatgttttggacaagagacgtggccgggaccctgagatggggggaaagccgagaaggaagaaccctcaggaaggcctgtacaatgaactgcagaaagataagatggcggaggcctacagtgagattgggatgaaaggcgagcgccggaggggcaaggggcacgatggcctttaccagggtctcagtacagccaccaaggacacctacgacgcccttcacatgcaggccctgccccctcgctaagcggccgcgtcgac

SEQ ID NO: 86 - protein, 486 aa, synthetic construct
MALPVTALLLPLALLLHAARPDIQMTQTTSSLSASLGDRVTISCRASQDISKYLNWYQQKPDGTVKLLIYHTSRLHSGVPSRFSGSGSGTDYSLTISNLEQEDIATYFCQQGNTLPYTFGGGTKLEITGGGGSGGGGSGGGGSEVKLQESGPGLVAPSQSLSVTCTVSGVSLPDYGVSWIRQPPRKGLEWLGVIWGSETTYYNSALKSRLTIIKDNSKSQVFLKMNSLQTDDTAIYYCAKHYYYGGSYAMDYWGQGTSVTVSSTTTPAPRPPTPAPTIASQPLSLRPEACRPAAGGAVHTRGLDFACDIYIWAPLAGTCGVLLLSLVITLYCKRGRKKLLYIFKQPFMRPVQTTQEEDGCSCRFPEEEEGGCELRVKFSRSADAPAYQQGQNQLYNELNLGRREEYDVLDKRRGRDPEMGGKPRRKNPQEGLYNELQKDKMAEAYSEIGMKGERRRGKGHDGLYQGLSTATKDTYDALHMQALPPR

SEQ ID NO: 87 - DNA, 6488 bp, synthetic construct
  source 1..6488: mol_type = other DNA
atgaaagaccccacctgtaggtttggcaagctagcttaagtaacgccattttgcaaggcatggaaaatacataactgagaatagagaagttcagatcaaggttaggaacagagagacagcagaatatgggccaaacaggatatctgtggtaagcagttcctgccccggctcagggccaagaacagatggtccccagatgcggtcccgccctcagcagtttctagagaaccatcagatgtttccagggtgccccaaggacctgaaatgaccctgtgccttatttgaactaaccaatcagttcgcttctcgcttctgttcgcgcgcttctgctccccgagctcaataaaagagcccacaacccctcactcggcgcgccagtcctccgatagactgcgtcgcccgggtacccgtattcccaataaagcctcttgctgtttgcatccgaatcgtggactcgctgatccttgggagggtctcctcagattgattgactgcccacctcgggggtctttcatttggaggttccaccgagatttggagacccctgcccagggaccaccgacccccccgccgggaggtaagctggccagcggtcgtttcgtgtctgtctctgtctttgtgcgtgtttgtgccggcatctaatgtttgcgcctgcgtctgtactagttagctaactagctctgtatctggcggacccgtggtggaactgacgagttctgaacacccggccgcaaccctgggagacgtcccagggactttgggggccgtttttgtggcccgacctgaggaagggagtcgatgtggaatccgaccccgtcaggatatgtggttctggtaggagacgagaacctaaaacagttcccgcctccgtctgaatttttgctttcggtttggaaccgaagccgcgcgtcttgtctgctgcagcgctgcagcatcgttctgtgttgtctctgtctgactgtgtttctgtatttgtctgaaaattagggccagactgttaccactcccttaagtttgaccttaggtcactggaaagatgtcgagcggatcgctcacaaccagtcggtagatgtcaagaagagacgttgggttaccttctgctctgcagaatggccaacctttaacgtcggatggccgcgagacggcacctttaaccgagacctcatcacccaggttaagatcaaggtcttttcacctggcccgcatggacacccagaccaggtcccctacatcgtgacctgggaagccttggcttttgacccccctccctgggtcaagccctttgtacaccctaagcctccgcctcctcttcctccatccgccccgtctctcccccttgaacctcctcgttcgaccccgcctcgatcctccctttatccagccctcactccttctctaggcgccggaattcgttaacctcgagcgggatcaattccgccccccccctaacgttactggccgaagccgcttggaataaggccggtgtgcgtttgtctatatgttattttccaccatattgccgtcttttggcaatgtgagggcccggaaacctggccctgtcttcttgacgagcattcctaggggtctttcccctctcgccaaaggaatgcaaggtctgttgaatgtcgtgaaggaagcagttcctctggaagcttcttgaagacaaacaacgtctgtagcgaccctttgcaggcagcggaaccccccacctggcgacaggtgcctctgcggccaaaagccacgtgtataagatacacctgcaaaggcggcacaaccccagtgccacgttgtgagttggatagttgtggaaagagtcaaatggctctcctcaagcgtattcaacaaggggctgaaggatgcccagaaggtaccccattgtatgggatctgatctggggcctcggtgcacatgctttacatgtgtttagtcgaggttaaaaaaacgtctaggccccccgaaccacggggacgtggttttcctttgaaaaacacgataataccatggtgagcaagggcgaggagctgttcaccggggtggtgcccatcctggtcgagctggacggcgacgtaaacggccacaagttcagcgtgtccggcgagggcgagggcgatgccacctacggcaagctgaccctgaagttcatctgcaccaccggcaagctgcccgtgccctggcccaccctcgtgaccaccctgacctacggcgtgcagtgcttcagccgctaccccgaccacatgaagcagcacgacttcttcaagtccgccatgcccgaaggctacgtccaggagcgcaccatcttcttcaaggacgacggcaactacaagacccgcgccgaggtgaagttcgagggcgacaccctggtgaaccgcatcgagctgaagggcatcgacttcaaggaggacggcaacatcctggggcacaagctggagtacaactacaacagccacaacgtctatatcatggccgacaagcagaagaacggcatcaaggtgaacttcaagatccgccacaacatcgaggacggcagcgtgcagctcgccgaccactaccagcagaacacccccatcggcgacggccccgtgctgctgcccgacaaccactacctgagcacccagtccgccctgagcaaagaccccaacgagaagcgcgatcacatggtcctgctggagttcgtgaccgccgccgggatcactctcggcatggacgagctgtacaagtaaagcggccgcgactctagagtcgacctgcaggcatgcaagcttcaggtagccggctaacgttaacaaccggtacctctagaactatagctagcatgcgcaaatttaaagcgctgatatcgataaaataaaagattttatttagtctccagaaaaaggggggaatgaaagaccccacctgtaggtttggcaagctagcttaagtaacgccattttgcaaggcatggaaaatacataactgagaatagagaagttcagatcaaggttaggaacagagagacagcagaatatgggccaaacaggatatctgtggtaagcagttcctgccccggctcagggccaagaacagatggtccccagatgcggtcccgccctcagcagtttctagagaaccatcagatgtttccagggtgccccaaggacctgaaatgaccctgtgccttatttgaactaaccaatcagttcgcttctcgcttctgttcgcgcgcttctgctccccgagctcaataaaagagcccacaacccctcactcggcgcgccagtcctccgatagactgcgtcgcccgggtacccgtgtatccaataaaccctcttgcagttgcatccgacttgtggtctcgctgttccttgggagggtctcctctgagtgattgactacccgtcagcgggggtctttcatgggtaacagtttcttgaagttggagaacaacattctgagggtaggagtcgaatattaagtaatcctgactcaattagccactgttttgaatccacatactccaatactcctgaaatagttcattatggacagcgcagaaagagctggggagaattgtgaaattgttatccgctcacaattccacacaacatacgagccggaagcataaagtgtaaagcctggggtgcctaatgagtgagctaactcacattaattgcgttgcgctcactgcccgctttccagtcgggaaacctgtcgtgccagctgcattaatgaatcggccaacgcgcggggagaggcggtttgcgtattgggcgctcttccgcttcctcgctcactgactcgctgcgctcggtcgttcggctgcggcgagcggtatcagctcactcaaaggcggtaatacggttatccacagaatcaggggataacgcaggaaagaacatgtgagcaaaaggccagcaaaaggccaggaaccgtaaaaaggccgcgttgctggcgtttttccataggctccgcccccctgacgagcatcacaaaaatcgacgctcaagtcagaggtggcgaaacccgacaggactataaagataccaggcgtttccccctggaagctccctcgtgcgctctcctgttccgaccctgccgcttaccggatacctgtccgcctttctcccttcgggaagcgtggcgctttctcatagctcacgctgtaggtatctcagttcggtgtaggtcgttcgctccaagctgggctgtgtgcacgaaccccccgttcagcccgaccgctgcgccttatccggtaactatcgtcttgagtccaacccggtaagacacgacttatcgccactggcagcagccactggtaacaggattagcagagcgaggtatgtaggcggtgctacagagttcttgaagtggtggcctaactacggctacactagaagaacagtatttggtatctgcgctctgctgaagccagttaccttcggaaaaagagttggtagctcttgatccggcaaacaaaccaccgctggtagcggtggtttttttgtttgcaagcagcagattacgcgcagaaaaaaaggatctcaagaagatcctttgatcttttctacggggtctgacgctcagtggaacgaaaactcacgttaagggattttggtcatgagattatcaaaaaggatcttcacctagatccttttaaattaaaaatgaagttttaaatcaatctaaagtatatatgagtaaacttggtctgacagttaccaatgcttaatcagtgaggcacctatctcagcgatctgtctatttcgttcatccatagttgcctgactccccgtcgtgtagataactacgatacgggagggcttaccatctggccccagtgctgcaatgataccgcgagacccacgctcaccggctccagatttatcagcaataaaccagccagccggaagggccgagcgcagaagtggtcctgcaactttatccgcctccatccagtctattaattgttgccgggaagctagagtaagtagttcgccagttaatagtttgcgcaacgttgttgccattgctacaggcatcgtggtgtcacgctcgtcgtttggtatggcttcattcagctccggttcccaacgatcaaggcgagttacatgatcccccatgttgtgcaaaaaagcggttagctccttcggtcctccgatcgttgtcagaagtaagttggccgcagtgttatcactcatggttatggcagcactgcataattctcttactgtcatgccatccgtaagatgcttttctgtgactggtgagtactcaaccaagtcattctgagaatagtgtatgcggcgaccgagttgctcttgcccggcgtcaatacgggataataccgcgccacatagcagaactttaaaagtgctcatcattggaaaacgttcttcggggcgaaaactctcaaggatcttaccgctgttgagatccagttcgatgtaacccactcgtgcacccaactgatcttcagcatcttttactttcaccagcgtttctgggtgagcaaaaacaggaaggcaaaatgccgcaaaaaagggaataagggcgacacggaaatgttgaatactcatactcttcctttttcaatattattgaagcatttatcagggttattgtctcatgagcggatacatatttgaatgtatttagaaaaataaacaaataggggttccgcgcacatttccccgaaaagtgccacctgacgtctaagaaaccattattatcatgacattaacctataaaaataggcgtatcacgaggccctttcgtctcgcgcgtttcggtgatgacggtgaaaacctctgacacatgcagctcccggagacggtcacagcttgtctgtaagcggatgccgggagcagacaagcccgtcagggcgcgtcagcgggtgttggcgggtgtcggggctggcttaactatgcggcatcagagcagattgtactgagagtgcaccatatgcggtgtgaaataccgcacagatgcgtaaggagaaaataccgcatcaggcgccattcgccattcaggctgcgcaactgttgggaagggcgatcggtgcgggcctcttcgctattacgccagctggcgaaagggggatgtgctgcaaggcgattaagttgggtaacgccagggttttcccagtcacgacgttgtaaaacgacggcgcaaggaatggtgcatgcaaggagatggcgcccaacagtcccccggccacggggcctgccaccatacccacgccgaaacaagcgctcatgagcccgaagtggcgagcccgatcttccccatcggtgatgtcggcgatataggcgccagcaaccgcacctgtggcgccggtgatgccggccacgatgcgtccggcgtagaggcgattagtccaatttgttaaagacaggatatcagtggtccaggctctagttttgactcaacaatatcaccagctgaagcctatagagtacgagccatagataaaataaaagattttatttagtctccagaaaaagggggga

SEQ ID NO: 88 - protein, 117 aa, synthetic construct
EVQLQQSGPELVKPGASMKISCKASGYSFTGYTMNWVKQSHGKNLEWIGLINPYNGGTIYNQKFKGKATLTVDKSSSTAYMELLSLTSEDSAVYYCARDYGFVLDYWGQGTTLTVSS

SEQ ID NO: 89 - protein, 107 aa, synthetic construct
QIVLTQSPAIMSASPGEKVTITCSASSSVSYLHWFQQKPGTSPKLWVYSTSNLPSGVPARFGGSGSGTSYSLTISRMEAEDAATYYCQQRSIYPPWTFGGGTKLEIK

SEQ ID NO: 90 - protein, 107 aa, synthetic construct
QIVLTQSPSIMSVSPGEKVTITCSASSSVSYMHWFQQKPGTSPKLGIYSTSNLASGVPARFSGRGSGTSYSLTISRVAAEDAATYYCQQRSNYPPWTFGGGTKLEIK

SEQ ID NO: 91 - protein, 107 aa, synthetic construct
QIVLTQSPSIMSVSPGEKVTITCSASSSVSYMHWFQQKPGTSPKLSIYSTSNLASGVPARFSGRGSGTSYSLTISRVAAEDAATYYCQQRSNYPPWTFGGGTKLEIK

SEQ ID NO: 92 - protein, 8 aa, synthetic construct
GYSFTGYT

SEQ ID NO: 93 - protein, 8 aa, synthetic construct
INPYNGGT

SEQ ID NO: 94 - protein, 10 aa, synthetic construct
ARDYGFVLDY

SEQ ID NO: 95 - protein, 5 aa, synthetic construct
SSVSY

SEQ ID NO: 96 - skipped

SEQ ID NO: 97 - protein, 8 aa, synthetic construct
QQRSIYPP

SEQ ID NO: 98 - protein, 5 aa, synthetic construct
SSVSY

SEQ ID NO: 99 - skipped

SEQ ID NO: 100 - protein, 8 aa, synthetic construct
QQRSNYPP

SEQ ID NO: 101 - protein, 5 aa, synthetic construct
SSVSY

SEQ ID NO: 102 - skipped

SEQ ID NO: 103 - protein, 8 aa, synthetic construct
QQRSNYPP

SEQ ID NO: 104 - protein, 120 aa, synthetic construct
QVQLVQSGGGVVQPGRSLRLSCAASGVSLPDYGVSWVRQAPGKGLEWVAVIWGSETTYYNSALKSRFTISRDNSKNTLYLQMNSLRAEDTAVYYCAKHYYYGGSYAMDYWGQGTLVTVSS

SEQ ID NO: 105 - protein, 107 aa, synthetic construct
DIQMTQSPSSLSASVGDRVTITCRASQDISKYLNWYQQKPGKAIKLLIYHTSRLHSGVPSRFSGSGSGTDFTLTISSLQPEDFATYYCQQGATLPYTFGPGTKVDIK

SEQ ID NO: 106 - protein, 450 aa, synthetic construct
QVQLVQSGGGVVQPGRSLRLSCAASGVSLPDYGVSWVRQAPGKGLEWVAVIWGSETTYYNSALKSRFTISRDNSKNTLYLQMNSLRAEDTAVYYCAKHYYYGGSYAMDYWGQGTLVTVSSASTKGPSVFPLAPSSKSTSGGTAALGCLVKDYFPEPVTVSWNSGALTSGVHTFPAVLQSSGLYSLSSVVTVPSSSLGTQTYICNVNHKPSNTKVDKKVEPKSCDKTHTCPPCPAPELLGGPSVFLFPPKPKDTLMISRTPEVTCVVVDVSHEDPEVKFNWYVDGVEVHNAKTKPREEQYNSTYRVVSVLTVLHQDWLNGKEYKCKVSNKALPAPIEKTISKAKGQPREPQVYTLPPSRDELTKNQVSLTCLVKGFYPSDIAVEWESNGQPENNYKTTPPVLDSDGSFFLYSKLTVDKSRWQQGNVFSCSVMHEALHNHYTQKSLSLSPGK

SEQ ID NO: 107 - protein, 214 aa, synthetic construct
DIQMTQSPSSLSASVGDRVTITCRASQDISKYLNWYQQKPGKAIKLLIYHTSRLHSGVPSRFSGSGSGTDFTLTISSLQPEDFATYYCQQGATLPYTFGPGTKVDIKRTVAAPSVFIFPPSDEQLKSGTASVVCLLNNFYPREAKVQWKVDNALQSGNSQESVTEQDSKDSTYSLSSTLTLSKADYEKHKVYACEVTHQGLSSPVTKSFNRGEC

SEQ ID NO: 108 - protein, 11 aa, synthetic construct
RASQDISKYLN

SEQ ID NO: 109 - protein, 7 aa, synthetic construct
HTSRLHS

SEQ ID NO: 110 - protein, 9 aa, synthetic construct
QQGNTLPYT

SEQ ID NO: 111 - protein, 10 aa, synthetic construct
GVSLPDYGVS

SEQ ID NO: 112 - protein, 16 aa, synthetic construct
VIWGSETTYYSSSLKS

SEQ ID NO: 113 - protein, 16 aa, synthetic construct
VIWGSETTYYQSSLKS

SEQ ID NO: 114 - protein, 16 aa, synthetic construct
VIWGSETTYYNSSLKS

SEQ ID NO: 115 - protein, 12 aa, synthetic construct
HYYYGGSYAMDY

SEQ ID NO: 116 - protein, 242 aa, synthetic construct
EIVMTQSPATLSLSPGERATLSCRASQDISKYLNWYQQKPGQAPRLLIYHTSRLHSGIPARFSGSGSGTDYTLTISSLQPEDFAVYFCQQGNTLPYTFGQGTKLEIKGGGGSGGGGSGGGGSQVQLQESGPGLVKPSETLSLTCTVSGVSLPDYGVSWIRQPPGKGLEWIGVIWGSETTYYQSSLKSRVTISKDNSKNQVSLKLSSVTAADTAVYYCAKHYYYGGSYAMDYWGQGTLVTVSS

SEQ ID NO: 117 - protein, 107 aa, synthetic construct
DIQMTQSPSSLSASVGDRVTITCRASQDISKYLNWYQQKPGGTVKLLIYHTSRLHSGVPSRFSGSGSGTDFTLTISSLQPEDIATYYCQQGNTLPYTFGGGTKLEIT

SEQ ID NO: 118 - protein, 107 aa, synthetic construct
DIQMTQSPSSLSASVGDRVTITCRASQDISKYLNWYQQKPGGTVKLLIYHTSRLHSGVPSRFSGSGSGTDFTLTISSLQPEDIATYFCQQGNTLPYTFGGGTKLEIT

SEQ ID NO: 119 - protein, 107 aa, synthetic construct
DIQMTQSPSSLSASVGDRVTITCRASQDISKYLNWYQQKPDGTVKLLIYHTSRLHSGVPSRFSGSGSGTDYTLTISSLQPEDIATYFCQQGNTLPYTFGGGTKLEIT

SEQ ID NO: 120 - protein, 120 aa, synthetic construct
QVQLQESGPGLVKPSQTLSLTCTVSGVSLPDYGVSWIRQPPGKGLEWIGVIWGSETTYYNSALKSRLTISKDNSKNQVSLKLSSVTAADTAVYYCAKHYYYGGSYAMDYWGQGTSVTVSS

SEQ ID NO: 121 - protein, 120 aa, synthetic construct
QVQLQESGPGLVKPSQTLSLTCTVSGVSLPDYGVSWIRQPPGKGLEWLGVIWGSETTYYNSALKSRLTISKDNSKSQVSLKLSSVTAADTAVYYCAKHYYYGGSYAMDYWGQGTSVTVSS

SEQ ID NO: 122 - protein, 120 aa, synthetic construct
QVQLQESGPGLVKPSQTLSVTCTVSGVSLPDYGVSWIRQPPGKGLEWLGVIWGSETTYYNSALKSRLTISKDNSKSQVSLKLSSVTAADTAVYYCAKHYYYGGSYAMDYWGQGTSVTVSS

SEQ ID NO: 123 - protein, 120 aa, synthetic construct
QVQLQESGPGLVKPSQTLSVTCTVSGVSLPDYGVSWIRQPPRKGLEWLGVIWGSETTYYNSALKSRLTISKDNSKSQVSLKMSSVTAADTAIYYCAKHYYYGGSYAMDYWGQGTSVTVSS

SEQ ID NO: 124 - protein, 11 aa, synthetic construct
RASQDISKYLN

SEQ ID NO: 125 - protein, 7 aa, synthetic construct
HTSRLHS

SEQ ID NO: 126 - protein, 9 aa, synthetic construct
QQGNTLPYT

SEQ ID NO: 127 - protein, 11 aa, synthetic construct
RASQDISKYLN

SEQ ID NO: 128 - protein, 7 aa, synthetic construct
HTSRLHS

SEQ ID NO: 129 - protein, 9 aa, synthetic construct
QQGNTLPYT

SEQ ID NO: 130 - protein, 11 aa, synthetic construct
RASQDISKYLN

SEQ ID NO: 131 - protein, 7 aa, synthetic construct
HTSRLHS

SEQ ID NO: 132 - protein, 9 aa, synthetic construct
QQGNTLPYT

SEQ ID NO: 133 - protein, 10 aa, synthetic construct
GVSLPDYGVS

SEQ ID NO: 134 - protein, 16 aa, synthetic construct
VIWGSETTYYNSALKS

SEQ ID NO: 135 - protein, 12 aa, synthetic construct
HYYYGGSYAMDY

SEQ ID NO: 136 - protein, 10 aa, synthetic construct
GVSLPDYGVS

SEQ ID NO: 137 - protein, 16 aa, synthetic construct
VIWGSETTYYNSALKS

SEQ ID NO: 138 - protein, 12 aa, synthetic construct
HYYYGGSYAMDY

SEQ ID NO: 139 - protein, 10 aa, synthetic construct
GVSLPDYGVS

SEQ ID NO: 140 - protein, 16 aa, synthetic construct
VIWGSETTYYNSALKS

SEQ ID NO: 141 - protein, 12 aa, synthetic construct
HYYYGGSYAMDY

SEQ ID NO: 142 - protein, 10 aa, synthetic construct
GVSLPDYGVS

SEQ ID NO: 143 - protein, 16 aa, synthetic construct
VIWGSETTYYNSALKS

SEQ ID NO: 144 - protein, 12 aa, synthetic construct
HYYYGGSYAMDY

SEQ ID NO: 145 - DNA, 1122 bp, synthetic construct
  source 1..1122: mol_type = other DNA
atggccttaccagtgaccgccttgctcctgccgctggccttgctgctccacgccgccaggccgttattcaaccaagaagttcaaattcccttgaccgaaagttactgtggcccatgtcctaaaaactggatatgttacaaaaataactgctaccaattttttgatgagagtaaaaactggtatgagagccaggcttcttgtatgtctcaaaatgccagccttctgaaagtatacagcaaagaggaccaggatttacttaaactggtgaagtcatatcattggatgggactagtacacattccaacaaatggatcttggcagtgggaagatggctccattctctcacccaacctactaacaataattgaaatgcagaagggagactgtgcactctatgcctcgagctttaaaggctatatagaaaactgttcaactccaaatacgtacatctgcatgcaaaggactgtgaccacgacgccagcgccgcgaccaccaacaccggcgcccaccatcgcgtcgcagcccctgtccctgcgcccagaggcgtgccggccagcggcggggggcgcagtgcacacgagggggctggacttcgcctgtgatatctacatctgggcgcccttggccgggacttgtggggtccttctcctgtcactggttatcaccctttactgccggagggaccagaggctgccccccgatgcccacaagccccctgggggaggcagtttccggacccccatccaagaggagcaggccgacgcccactccaccctggccaagatcagagtgaagttcagcaggagcgcagacgcccccgcgtaccagcagggccagaaccagctctataacgagctcaatctaggacgaagagaggagtacgatgttttggacaagagacgtggccgggaccctgagatggggggaaagccgagaaggaagaaccctcaggaaggcctgtacaatgaactgcagaaagataagatggcggaggcctacagtgagattgggatgaaaggcgagcgccggaggggcaaggggcacgatggcctttaccagggtctcagtacagccaccaaggacacctacgacgcccttcacatgcaggccctgccccctcgc

SEQ ID NO: 146 - protein, 341 aa, synthetic construct
MALPVTALLLPLALLLHAARPLFNQEVQIPLTESYCGPCPKNWICYKNNCYQFFDESKNWYESQASCMSQNASLLKVYSKEDQDLLKLVKSYHWMGLVHIPTNGSWQWEDGSILSPNLLTIIEMQKGDCALYASSFKGYIENCSTPNTYICMQRTVESKYGPPCPSCPIYIWAPLAGTCGVLLLSLVITLYCRRDQRLPPDAHKPPGGGSFRTPIQEEQADAHSTLAKIRVKFSRSADAPAYQQGQNQLYNELNLGRREEYDVLDKRRGRDPEMGGKPRRKNPQEGLYNELQKDKMAEAYSEIGMKGERRRGKGHDGLYQGLSTATKDTYDALHMQALPPR

SEQ ID NO: 147 - RNA, 20 nt, synthetic construct
  source 1..20: mol_type = other RNA
cccctaccatgactttattc

SEQ ID NO: 148 - RNA, 20 nt, synthetic construct
  source 1..20: mol_type = other RNA
attgcactcatcagagctac

SEQ ID NO: 149 - RNA, 20 nt, synthetic construct
  source 1..20: mol_type = other RNA
agtcatggtaggggagcttg

SEQ ID NO: 150 - RNA, 20 nt, synthetic construct
  source 1..20: mol_type = other RNA
tgctggcgatacgcgtccac

SEQ ID NO: 151 - RNA, 20 nt, synthetic construct
  source 1..20: mol_type = other RNA
gtgagcaatcccccgggcga

SEQ ID NO: 152 - RNA, 20 nt, synthetic construct
  source 1..20: mol_type = other RNA
aacgtgcggtgggatcgtgc

SEQ ID NO: 153 - RNA, 20 nt, synthetic construct
  source 1..20: mol_type = other RNA
ctcaccagattcccgaaggt

SEQ ID NO: 154 - RNA, 20 nt, synthetic construct
  source 1..20: mol_type = other RNA
ccgccttgtcatcaaccgtc

SEQ ID NO: 155 - RNA, 20 nt, synthetic construct
  source 1..20: mol_type = other RNA
tctgcgttcaggggtaagcg

SEQ ID NO: 156 - RNA, 20 nt, synthetic construct
  source 1..20: mol_type = other RNA
gcgcttacccctgaacgcag

SEQ ID NO: 157 - RNA, 20 nt, synthetic construct
  source 1..20: mol_type = other RNA
cgcagaggaccatgtccccg

SEQ ID NO: 158 - RNA, 20 nt, synthetic construct
  source 1..20: mol_type = other RNA
ggagctgatggtaaatctgc

SEQ ID NO: 159 - RNA, 20 nt, synthetic construct
  source 1..20: mol_type = other RNA
ttgaaggtttaattccgcat

SEQ ID NO: 160 - RNA, 20 nt, synthetic construct
  source 1..20: mol_type = other RNA
aacaactatcgttaccacag

SEQ ID NO: 161 - RNA, 23 nt, synthetic construct
  source 1..23: mol_type = other RNA
tcaccaagcccgcgaccaatggg

SEQ ID NO: 162 - RNA, 23 nt, synthetic construct
  source 1..23: mol_type = other RNA
gctttggtcccattggtcgcggg

SEQ ID NO: 163 - RNA, 23 nt, synthetic construct
  source 1..23: mol_type = other RNA
accctcctccggcatcgccgcgg

SEQ ID NO: 164 - RNA, 23 nt, synthetic construct
  source 1..23: mol_type = other RNA
taatctggtggacctcatgaagg

SEQ ID NO: 165 - RNA, 23 nt, synthetic construct
  source 1..23: mol_type = other RNA
tcggttggcaaacgtccgaaagg

SEQ ID NO: 166 - RNA, 23 nt, synthetic construct
  source 1..23: mol_type = other RNA
agcaagctgccgcagatcgcagg

SEQ ID NO: 167 - RNA, 23 nt, synthetic construct
  source 1..23: mol_type = other RNA
gaacggtaggtcccctctcgtgg

SEQ ID NO: 168 - RNA, 23 nt, synthetic construct
  source 1..23: mol_type = other RNA
agctgccttggacgacgggcagg

SEQ ID NO: 169 - RNA, 23 nt, synthetic construct
  source 1..23: mol_type = other RNA
tgagccgtaacttcattgagagg

SEQ ID NO: 170 - RNA, 20 nt, synthetic construct
  source 1..20: mol_type = other RNA
agtgctggtgttgggcgcac

SEQ ID NO: 171 - RNA, 23 nt, synthetic construct
  source 1..23: mol_type = other RNA
gtgaacagtgccgttccgggggg

SEQ ID NO: 172 - RNA, 23 nt, synthetic construct
  source 1..23: mol_type = other RNA
ggcaccggtacatttgttaatgg

SEQ ID NO: 173 - RNA, 23 nt, synthetic construct
  source 1..23: mol_type = other RNA
ttcgccagacgcgccgcctgcgg

SEQ ID NO: 174 - protein, 374 aa, synthetic construct
MALPVTALLLPLALLLHAARPLFNQEVQIPLTESYCGPCPKNWICYKNNCYQFFDESKNWYESQASCMSQNASLLKVYSKEDQDLLKLVKSYHWMGLVHIPTNGSWQWEDGSILSPNLLTIIEMQKGDCALYASSFKGYIENCSTPNTYICMQRTVTTTPAPRPPTPAPTIASQPLSLRPEACRPAAGGAVHTRGLDFACDIYIWAPLAGTCGVLLLSLVITLYCRRDQRLPPDAHKPPGGGSFRTPIQEEQADAHSTLAKIRVKFSRSADAPAYQQGQNQLYNELNLGRREEYDVLDKRRGRDPEMGGKPRRKNPQEGLYNELQKDKMAEAYSEIGMKGERRRGKGHDGLYQGLSTATKDTYDALHMQALPPR

SEQ ID NO: 175 - DNA, 2150 bp, synthetic construct
  source 1..2150: mol_type = other DNA
gaattcgccgccaccatggccttaccagtgaccgccttgctcctgccgctggccttgctgctccacgccgccaggccggatattcagatgacccagagcccgagcagcctgagcgcgagcgtgggcgatcgcgtgaccattacctgccgcgcgagccaggatattagcaaatatctgaactggtatcagcagaaaccgggcggcaccgtgaaactgctgatttatcataccagccgcctgcatagcggcgtgccgagccgctttagcggcagcggcagcggcaccgattttaccctgaccattagcagcctgcagccggaagatattgcgacctattattgccagcagggcaacaccctgccgtatacctttggcggcggcaccaaactggaaattaccggtggcggtggctcgggcggtggtgggtcgggtggcggcggatctcaggtgcagctgcaggaaagcggcccgggcctggtgaaaccgagccagaccctgagcctgacctgcaccgtgagcggcgtgagcctgccggattatggcgtgagctggattcgccagccgccgggcaaaggcctggaatggattggcgtgatttggggcagcgaaaccacctattataacagcgcgctgaaaagccgcctgaccattagcaaagataacagcaaaaaccaggtgagcctgaaactgagcagcgtgaccgcggcggataccgcggtgtattattgcgcgaaacattattattatggcggcagctatgcgatggattattggggccagggcaccagcgtgaccgtgagcagcaccacgacgccagcgccgcgaccaccaacaccggcgcccaccatcgcgtcgcagcccctgtccctgcgcccagaggcgtgccggccagcggcggggggcgcagtgcacacgagggggctggacttcgcctgtgatatctacatctgggcgcccttggccgggacttgtggggtccttctcctgtcactggttatcaccctttactgccggagggaccagaggctgccccccgatgcccacaagccccctgggggaggcagtttccggacccccatccaagaggagcaggccgacgcccactccaccctggccaagatcagagtgaagttcagcaggagcgcagacgcccccgcgtaccagcagggccagaaccagctctataacgagctcaatctaggacgaagagaggagtacgatgttttggacaagagacgtggccgggaccctgagatggggggaaagccgagaaggaagaaccctcaggaaggcctgtacaatgaactgcagaaagataagatggcggaggcctacagtgagattgggatgaaaggcgagcgccggaggggcaaggggcacgatggcctttaccagggtctcagtacagccaccaaggacacctacgacgcccttcacatgcaggccctgccccctcgcggctctggcgagggaaggggttccctgcttacttgcggcgacgtcgaagagaatcccggtccgatggccctcccagtaactgccctccttttgcccctcgcactccttcttcatgccgctcgccccaactgggtcaacgtgattagcgatttgaagaaaatcgaggaccttatacagtctatgcatattgacgctacactgtatactgagagtgatgtacacccgtcctgtaaggtaacggccatgaaatgctttcttctggagctccaggtcatcagcttggagtctggggacgcaagcatccacgatacggttgaaaacctcatcatccttgcgaacaactctctctcatctaatggaaacgttacagagagtgggtgtaaggagtgcgaagagttggaagaaaaaaacatcaaagaatttcttcaatccttcgttcacatagtgcaaatgttcattaacacgtccactaccacacccgccccgaggccacctacgccggcaccgactatcgccagtcaacccctctctctgcgccccgaggcttgccggcctgcggctggtggggcggtccacacccggggcctggattttgcgtgcgatatatacatctgggcacctcttgccggcacctgcggagtgctgcttctctcactcgttattacgctgtactgctaagcggccgcgtcgac

SEQ ID NO: 176 - protein, 706 aa, synthetic construct
MALPVTALLLPLALLLHAARPDIQMTQSPSSLSASVGDRVTITCRASQDISKYLNWYQQKPGGTVKLLIYHTSRLHSGVPSRFSGSGSGTDFTLTISSLQPEDIATYYCQQGNTLPYTFGGGTKLEITGGGGSGGGGSGGGGSQVQLQESGPGLVKPSQTLSLTCTVSGVSLPDYGVSWIRQPPGKGLEWIGVIWGSETTYYNSALKSRLTISKDNSKNQVSLKLSSVTAADTAVYYCAKHYYYGGSYAMDYWGQGTSVTVSSTTTPAPRPPTPAPTIASQPLSLRPEACRPAAGGAVHTRGLDFACDIYIWAPLAGTCGVLLLSLVITLYCRRDQRLPPDAHKPPGGGSFRTPIQEEQADAHSTLAKIRVKFSRSADAPAYQQGQNQLYNELNLGRREEYDVLDKRRGRDPEMGGKPRRKNPQEGLYNELQKDKMAEAYSEIGMKGERRRGKGHDGLYQGLSTATKDTYDALHMQALPPRGSGEGRGSLLTCGDVEENPGPMALPVTALLLPLALLLHAARPNWVNVISDLKKIEDLIQSMHIDATLYTESDVHPSCKVTAMKCFLLELQVISLESGDASIHDTVENLIILANNSLSSNGNVTESGCKECEELEEKNIKEFLQSFVHIVQMFINTSTTTPAPRPPTPAPTIASQPLSLRPEACRPAAGGAVHTRGLDFACDIYIWAPLAGTCGVLLLSLVITLYC

SEQ ID NO: 177 - DNA, 2150 bp, synthetic construct
  source 1..2150: mol_type = other DNA
gaattcgccgccaccatggccttaccagtgaccgccttgctcctgccgctggccttgctgctccacgccgccaggccggatattcagatgacccagagcccgagcagcctgagcgcgagcgtgggcgatcgcgtgaccattacctgccgcgcgagccaggatattagcaaatatctgaactggtatcagcagaaaccgggcggcaccgtgaaactgctgatttatcataccagccgcctgcatagcggcgtgccgagccgctttagcggcagcggcagcggcaccgattttaccctgaccattagcagcctgcagccggaagatattgcgacctatttttgccagcagggcaacaccctgccgtatacctttggcggcggcaccaaactggaaattaccggtggcggtggctcgggcggtggtgggtcgggtggcggcggatctcaggtgcagctgcaggaaagcggcccgggcctggtgaaaccgagccagaccctgagcctgacctgcaccgtgagcggcgtgagcctgccggattatggcgtgagctggattcgccagccgccgggcaaaggcctggaatggattggcgtgatttggggcagcgaaaccacctattataacagcgcgctgaaaagccgcctgaccattagcaaagataacagcaaaaaccaggtgagcctgaaactgagcagcgtgaccgcggcggataccgcggtgtattattgcgcgaaacattattattatggcggcagctatgcgatggattattggggccagggcaccagcgtgaccgtgagcagcaccacgacgccagcgccgcgaccaccaacaccggcgcccaccatcgcgtcgcagcccctgtccctgcgcccagaggcgtgccggccagcggcggggggcgcagtgcacacgagggggctggacttcgcctgtgatatctacatctgggcgcccttggccgggacttgtggggtccttctcctgtcactggttatcaccctttactgccggagggaccagaggctgccccccgatgcccacaagccccctgggggaggcagtttccggacccccatccaagaggagcaggccgacgcccactccaccctggccaagatcagagtgaagttcagcaggagcgcagacgcccccgcgtaccagcagggccagaaccagctctataacgagctcaatctaggacgaagagaggagtacgatgttttggacaagagacgtggccgggaccctgagatggggggaaagccgagaaggaagaaccctcaggaaggcctgtacaatgaactgcagaaagataagatggcggaggcctacagtgagattgggatgaaaggcgagcgccggaggggcaaggggcacgatggcctttaccagggtctcagtacagccaccaaggacacctacgacgcccttcacatgcaggccctgccccctcgcggctctggcgagggaaggggttccctgcttacttgcggcgacgtcgaagagaatcccggtccgatggccctcccagtaactgccctccttttgcccctcgcactccttcttcatgccgctcgccccaactgggtcaacgtgattagcgatttgaagaaaatcgaggaccttatacagtctatgcatattgacgctacactgtatactgagagtgatgtacacccgtcctgtaaggtaacggccatgaaatgctttcttctggagctccaggtcatcagcttggagtctggggacgcaagcatccacgatacggttgaaaacctcatcatccttgcgaacaactctctctcatctaatggaaacgttacagagagtgggtgtaaggagtgcgaagagttggaagaaaaaaacatcaaagaatttcttcaatccttcgttcacatagtgcaaatgttcattaacacgtccactaccacacccgccccgaggccacctacgccggcaccgactatcgccagtcaacccctctctctgcgccccgaggcttgccggcctgcggctggtggggcggtccacacccggggcctggattttgcgtgcgatatatacatctgggcacctcttgccggcacctgcggagtgctgcttctctcactcgttattacgctgtactgctaagcggccgcgtcgac

SEQ ID NO: 178 - protein, 706 aa, synthetic construct
MALPVTALLLPLALLLHAARPDIQMTQSPSSLSASVGDRVTITCRASQDISKYLNWYQQKPGGTVKLLIYHTSRLHSGVPSRFSGSGSGTDFTLTISSLQPEDIATYFCQQGNTLPYTFGGGTKLEITGGGGSGGGGSGGGGSQVQLQESGPGLVKPSQTLSLTCTVSGVSLPDYGVSWIRQPPGKGLEWIGVIWGSETTYYNSALKSRLTISKDNSKNQVSLKLSSVTAADTAVYYCAKHYYYGGSYAMDYWGQGTSVTVSSTTTPAPRPPTPAPTIASQPLSLRPEACRPAAGGAVHTRGLDFACDIYIWAPLAGTCGVLLLSLVITLYCRRDQRLPPDAHKPPGGGSFRTPIQEEQADAHSTLAKIRVKFSRSADAPAYQQGQNQLYNELNLGRREEYDVLDKRRGRDPEMGGKPRRKNPQEGLYNELQKDKMAEAYSEIGMKGERRRGKGHDGLYQGLSTATKDTYDALHMQALPPRGSGEGRGSLLTCGDVEENPGPMALPVTALLLPLALLLHAARPNWVNVISDLKKIEDLIQSMHIDATLYTESDVHPSCKVTAMKCFLLELQVISLESGDASIHDTVENLIILANNSLSSNGNVTESGCKECEELEEKNIKEFLQSFVHIVQMFINTSTTTPAPRPPTPAPTIASQPLSLRPEACRPAAGGAVHTRGLDFACDIYIWAPLAGTCGVLLLSLVITLYC

SEQ ID NO: 179 - DNA, 2150 bp, synthetic construct
  source 1..2150: mol_type = other DNA
gaattcgccgccaccatggccttaccagtgaccgccttgctcctgccgctggccttgctgctccacgccgccaggccggatattcagatgacccagagcccgagcagcctgagcgcgagcgtgggcgatcgcgtgaccattacctgccgcgcgagccaggatattagcaaatatctgaactggtatcagcagaaaccggatggcaccgtgaaactgctgatttatcataccagccgcctgcatagcggcgtgccgagccgctttagcggcagcggcagcggcaccgattataccctgaccattagcagcctgcagccggaagatattgcgacctatttttgccagcagggcaacaccctgccgtatacctttggcggcggcaccaaactggaaattaccggtggcggtggctcgggcggtggtgggtcgggtggcggcggatctcaggtgcagctgcaggaaagcggcccgggcctggtgaaaccgagccagaccctgagcctgacctgcaccgtgagcggcgtgagcctgccggattatggcgtgagctggattcgccagccgccgggcaaaggcctggaatggattggcgtgatttggggcagcgaaaccacctattataacagcgcgctgaaaagccgcctgaccattagcaaagataacagcaaaaaccaggtgagcctgaaactgagcagcgtgaccgcggcggataccgcggtgtattattgcgcgaaacattattattatggcggcagctatgcgatggattattggggccagggcaccagcgtgaccgtgagcagcaccacgacgccagcgccgcgaccaccaacaccggcgcccaccatcgcgtcgcagcccctgtccctgcgcccagaggcgtgccggccagcggcggggggcgcagtgcacacgagggggctggacttcgcctgtgatatctacatctgggcgcccttggccgggacttgtggggtccttctcctgtcactggttatcaccctttactgccggagggaccagaggctgccccccgatgcccacaagccccctgggggaggcagtttccggacccccatccaagaggagcaggccgacgcccactccaccctggccaagatcagagtgaagttcagcaggagcgcagacgcccccgcgtaccagcagggccagaaccagctctataacgagctcaatctaggacgaagagaggagtacgatgttttggacaagagacgtggccgggaccctgagatggggggaaagccgagaaggaagaaccctcaggaaggcctgtacaatgaactgcagaaagataagatggcggaggcctacagtgagattgggatgaaaggcgagcgccggaggggcaaggggcacgatggcctttaccagggtctcagtacagccaccaaggacacctacgacgcccttcacatgcaggccctgccccctcgcggctctggcgagggaaggggttccctgcttacttgcggcgacgtcgaagagaatcccggtccgatggccctcccagtaactgccctccttttgcccctcgcactccttcttcatgccgctcgccccaactgggtcaacgtgattagcgatttgaagaaaatcgaggaccttatacagtctatgcatattgacgctacactgtatactgagagtgatgtacacccgtcctgtaaggtaacggccatgaaatgctttcttctggagctccaggtcatcagcttggagtctggggacgcaagcatccacgatacggttgaaaacctcatcatccttgcgaacaactctctctcatctaatggaaacgttacagagagtgggtgtaaggagtgcgaagagttggaagaaaaaaacatcaaagaatttcttcaatccttcgttcacatagtgcaaatgttcattaacacgtccactaccacacccgccccgaggccacctacgccggcaccgactatcgccagtcaacccctctctctgcgccccgaggcttgccggcctgcggctggtggggcggtccacacccggggcctggattttgcgtgcgatatatacatctgggcacctcttgccggcacctgcggagtgctgcttctctcactcgttattacgctgtactgctaagcggccgcgtcgac

SEQ ID NO: 180 - protein, 706 aa, synthetic construct
MALPVTALLLPLALLLHAARPDIQMTQSPSSLSASVGDRVTITCRASQDISKYLNWYQQKPDGTVKLLIYHTSRLHSGVPSRFSGSGSGTDYTLTISSLQPEDIATYFCQQGNTLPYTFGGGTKLEITGGGGSGGGGSGGGGSQVQLQESGPGLVKPSQTLSLTCTVSGVSLPDYGVSWIRQPPGKGLEWIGVIWGSETTYYNSALKSRLTISKDNSKNQVSLKLSSVTAADTAVYYCAKHYYYGGSYAMDYWGQGTSVTVSSTTTPAPRPPTPAPTIASQPLSLRPEACRPAAGGAVHTRGLDFACDIYIWAPLAGTCGVLLLSLVITLYCRRDQRLPPDAHKPPGGGSFRTPIQEEQADAHSTLAKIRVKFSRSADAPAYQQGQNQLYNELNLGRREEYDVLDKRRGRDPEMGGKPRRKNPQEGLYNELQKDKMAEAYSEIGMKGERRRGKGHDGLYQGLSTATKDTYDALHMQALPPRGSGEGRGSLLTCGDVEENPGPMALPVTALLLPLALLLHAARPNWVNVISDLKKIEDLIQSMHIDATLYTESDVHPSCKVTAMKCFLLELQVISLESGDASIHDTVENLIILANNSLSSNGNVTESGCKECEELEEKNIKEFLQSFVHIVQMFINTSTTTPAPRPPTPAPTIASQPLSLRPEACRPAAGGAVHTRGLDFACDIYIWAPLAGTCGVLLLSLVITLYC

SEQ ID NO: 181 - DNA, 2150 bp, synthetic construct
  source 1..2150: mol_type = other DNA
gaattcgccgccaccatggccttaccagtgaccgccttgctcctgccgctggccttgctgctccacgccgccaggccggatattcagatgacccagagcccgagcagcctgagcgcgagcgtgggcgatcgcgtgaccattacctgccgcgcgagccaggatattagcaaatatctgaactggtatcagcagaaaccgggcggcaccgtgaaactgctgatttatcataccagccgcctgcatagcggcgtgccgagccgctttagcggcagcggcagcggcaccgattttaccctgaccattagcagcctgcagccggaagatattgcgacctattattgccagcagggcaacaccctgccgtatacctttggcggcggcaccaaactggaaattaccggtggcggtggctcgggcggtggtgggtcgggtggcggcggatctcaggtgcagctgcaggaaagcggcccgggcctggtgaaaccgagccagaccctgagcctgacctgcaccgtgagcggcgtgagcctgccggattatggcgtgagctggattcgccagccgccgggcaaaggcctggaatggctgggcgtgatttggggcagcgaaaccacctattataacagcgcgctgaaaagccgcctgaccattagcaaagataacagcaaaagccaggtgagcctgaaactgagcagcgtgaccgcggcggataccgcggtgtattattgcgcgaaacattattattatggcggcagctatgcgatggattattggggccagggcaccagcgtgaccgtgagcagcaccacgacgccagcgccgcgaccaccaacaccggcgcccaccatcgcgtcgcagcccctgtccctgcgcccagaggcgtgccggccagcggcggggggcgcagtgcacacgagggggctggacttcgcctgtgatatctacatctgggcgcccttggccgggacttgtggggtccttctcctgtcactggttatcaccctttactgccggagggaccagaggctgccccccgatgcccacaagccccctgggggaggcagtttccggacccccatccaagaggagcaggccgacgcccactccaccctggccaagatcagagtgaagttcagcaggagcgcagacgcccccgcgtaccagcagggccagaaccagctctataacgagctcaatctaggacgaagagaggagtacgatgttttggacaagagacgtggccgggaccctgagatggggggaaagccgagaaggaagaaccctcaggaaggcctgtacaatgaactgcagaaagataagatggcggaggcctacagtgagattgggatgaaaggcgagcgccggaggggcaaggggcacgatggcctttaccagggtctcagtacagccaccaaggacacctacgacgcccttcacatgcaggccctgccccctcgcggctctggcgagggaaggggttccctgcttacttgcggcgacgtcgaagagaatcccggtccgatggccctcccagtaactgccctccttttgcccctcgcactccttcttcatgccgctcgccccaactgggtcaacgtgattagcgatttgaagaaaatcgaggaccttatacagtctatgcatattgacgctacactgtatactgagagtgatgtacacccgtcctgtaaggtaacggccatgaaatgctttcttctggagctccaggtcatcagcttggagtctggggacgcaagcatccacgatacggttgaaaacctcatcatccttgcgaacaactctctctcatctaatggaaacgttacagagagtgggtgtaaggagtgcgaagagttggaagaaaaaaacatcaaagaatttcttcaatccttcgttcacatagtgcaaatgttcattaacacgtccactaccacacccgccccgaggccacctacgccggcaccgactatcgccagtcaacccctctctctgcgccccgaggcttgccggcctgcggctggtggggcggtccacacccggggcctggattttgcgtgcgatatatacatctgggcacctcttgccggcacctgcggagtgctgcttctctcactcgttattacgctgtactgctaagcggccgcgtcgac

SEQ ID NO: 182 - protein, 706 aa, synthetic construct
MALPVTALLLPLALLLHAARPDIQMTQSPSSLSASVGDRVTITCRASQDISKYLNWYQQKPGGTVKLLIYHTSRLHSGVPSRFSGSGSGTDFTLTISSLQPEDIATYYCQQGNTLPYTFGGGTKLEITGGGGSGGGGSGGGGSQVQLQESGPGLVKPSQTLSLTCTVSGVSLPDYGVSWIRQPPGKGLEWLGVIWGSETTYYNSALKSRLTISKDNSKSQVSLKLSSVTAADTAVYYCAKHYYYGGSYAMDYWGQGTSVTVSSTTTPAPRPPTPAPTIASQPLSLRPEACRPAAGGAVHTRGLDFACDIYIWAPLAGTCGVLLLSLVITLYCRRDQRLPPDAHKPPGGGSFRTPIQEEQADAHSTLAKIRVKFSRSADAPAYQQGQNQLYNELNLGRREEYDVLDKRRGRDPEMGGKPRRKNPQEGLYNELQKDKMAEAYSEIGMKGERRRGKGHDGLYQGLSTATKDTYDALHMQALPPRGSGEGRGSLLTCGDVEENPGPMALPVTALLLPLALLLHAARPNWVNVISDLKKIEDLIQSMHIDATLYTESDVHPSCKVTAMKCFLLELQVISLESGDASIHDTVENLIILANNSLSSNGNVTESGCKECEELEEKNIKEFLQSFVHIVQMFINTSTTTPAPRPPTPAPTIASQPLSLRPEACRPAAGGAVHTRGLDFACDIYIWAPLAGTCGVLLLSLVITLYC

SEQ ID NO: 183 - DNA, 2153 bp, synthetic construct
  source 1..2153: mol_type = other DNA
gaattcgccgccaccatggccttaccagtgaccgccttgctcctgccgctggccttgctgctccacgccgccaggccggatattcagatgacccagagcccgagcagcctgagcgcgagcgtgggcgatcgcgtgaccattacctgccgcgcgagccaggatattagcaaatatctgaactggtatcagcagaaaccgggcggcaccgtgaaactgctgatttatcataccagccgcctgcatagcggcgtgccgagccgctttagcggcagcggcagcggcaccgattttaccctgaccattagcagcctgcagccggaagatattgcgacctatttttgccagcagggcaacaccctgccgtatacctttggcggcggcaccaaactggaaattaccggtggcggtggctcgggcggtggtgggtcgggtggcggcggatctcaggtgcagctgcaggagtcaggacctggcctggtgaaaccctcacagactctgtccctgacatgcactgtctcaggggtctcattacccgactatggtgtaagctggattcgccagcctccaggtaagggtctggagtggctgggagtaatatggggtagtgaaaccacatactataattcagctctcaaatccagactgaccatctccaaggacaactccaagagccaagtttccttaaaattaagtagtgttactgctgctgacacagccgtctactactgtgccaaacattattactacggtggtagctatgctatggactactggggccaaggaacctcagtcaccgtctcctcaaccacgacgccagcgccgcgaccaccaacaccggcgcccaccatcgcgtcgcagcccctgtccctgcgcccagaggcgtgccggccagcggcggggggcgcagtgcacacgagggggctggacttcgcctgtgatatctacatctgggcgcccttggccgggacttgtggggtccttctcctgtcactggttatcaccctttactgccggagggaccagaggctgccccccgatgcccacaagccccctgggggaggcagtttccggacccccatccaagaggagcaggccgacgcccactccaccctggccaagatcagagtgaagttcagcagatctagcgcagacgcccccgcgtaccagcagggccagaaccagctctataacgagctcaatctaggacgaagagaggagtacgatgttttggacaagagacgtggccgggaccctgagatggggggaaagccgagaaggaagaaccctcaggaaggcctgtacaatgaactgcagaaagataagatggcggaggcctacagtgagattgggatgaaaggcgagcgccggaggggcaaggggcacgatggcctttaccagggtctcagtacagccaccaaggacacctacgacgcccttcacatgcaggccctgccccctcgcggctctggcgagggaaggggttccctgcttacttgcggcgacgtcgaagagaatcccggtccgatggccctcccagtaactgccctccttttgcccctcgcactccttcttcatgccgctcgccccaactgggtcaacgtgattagcgatttgaagaaaatcgaggaccttatacagtctatgcatattgacgctacactgtatactgagagtgatgtacacccgtcctgtaaggtaacggccatgaaatgctttcttctggagctccaggtcatcagcttggagtctggggacgcaagcatccacgatacggttgaaaacctcatcatccttgcgaacaactctctctcatctaatggaaacgttacagagagtgggtgtaaggagtgcgaagagttggaagaaaaaaacatcaaagaatttcttcaatccttcgttcacatagtgcaaatgttcattaacacgtccactaccacacccgccccgaggccacctacgccggcaccgactatcgccagtcaacccctctctctgcgccccgaggcttgccggcctgcggctggtggggcggtccacacccggggcctggattttgcgtgcgatatatacatctgggcacctcttgccggcacctgcggagtgctgcttctctcactcgttattacgctgtactgctaagcggccgcgtcgac

SEQ ID NO: 184 - protein, 707 aa, synthetic construct
MALPVTALLLPLALLLHAARPDIQMTQSPSSLSASVGDRVTITCRASQDISKYLNWYQQKPGGTVKLLIYHTSRLHSGVPSRFSGSGSGTDFTLTISSLQPEDIATYFCQQGNTLPYTFGGGTKLEITGGGGSGGGGSGGGGSQVQLQESGPGLVKPSQTLSLTCTVSGVSLPDYGVSWIRQPPGKGLEWLGVIWGSETTYYNSALKSRLTISKDNSKSQVSLKLSSVTAADTAVYYCAKHYYYGGSYAMDYWGQGTSVTVSSTTTPAPRPPTPAPTIASQPLSLRPEACRPAAGGAVHTRGLDFACDIYIWAPLAGTCGVLLLSLVITLYCRRDQRLPPDAHKPPGGGSFRTPIQEEQADAHSTLAKIRVKFSRSSADAPAYQQGQNQLYNELNLGRREEYDVLDKRRGRDPEMGGKPRRKNPQEGLYNELQKDKMAEAYSEIGMKGERRRGKGHDGLYQGLSTATKDTYDALHMQALPPRGSGEGRGSLLTCGDVEENPGPMALPVTALLLPLALLLHAARPNWVNVISDLKKIEDLIQSMHIDATLYTESDVHPSCKVTAMKCFLLELQVISLESGDASIHDTVENLIILANNSLSSNGNVTESGCKECEELEEKNIKEFLQSFVHIVQMFINTSTTTPAPRPPTPAPTIASQPLSLRPEACRPAAGGAVHTRGLDFACDIYIWAPLAGTCGVLLLSLVITLYC

SEQ ID NO: 185 - DNA, 2150 bp, synthetic construct
  source 1..2150: mol_type = other DNA
gaattcgccgccaccatggccttaccagtgaccgccttgctcctgccgctggccttgctgctccacgccgccaggccggacatccagatgacacagagcccgtcctccctgtctgcctctgtgggagacagagtcaccatcacctgcagggcaagtcaggacattagtaaatatttaaattggtatcagcagaaaccagacggaactgttaaactcctgatctaccatacatcaagattacactcaggagtcccatcaaggttcagtggcagtgggtctggaacagattacaccctcaccattagcagcctgcaaccggaagatattgccacttacttctgccaacagggtaatacgcttccgtacacgttcggaggggggaccaagctggagatcacaggtggcggtggctcgggcggtggtgggtcgggtggcggcggatctcaggtgcagctgcaggagtcaggacctggcctggtgaaaccctcacagactctgtccctgacatgcactgtctcaggggtctcattacccgactatggtgtaagctggattcgccagcctccaggtaagggtctggagtggctgggagtaatatggggtagtgaaaccacatactataattcagctctcaaatccagactgaccatctccaaggacaactccaagagccaagtttccttaaaattaagtagtgttactgctgctgacacagccgtctactactgtgccaaacattattactacggtggtagctatgctatggactactggggccaaggaacctcagtcaccgtctcctcaaccacgacgccagcgccgcgaccaccaacaccggcgcccaccatcgcgtcgcagcccctgtccctgcgcccagaggcgtgccggccagcggcggggggcgcagtgcacacgagggggctggacttcgcctgtgatatctacatctgggcgcccttggccgggacttgtggggtccttctcctgtcactggttatcaccctttactgccggagggaccagaggctgccccccgatgcccacaagccccctgggggaggcagtttccggacccccatccaagaggagcaggccgacgcccactccaccctggccaagatcagagtgaagttcagcaggagcgcagacgcccccgcgtaccagcagggccagaaccagctctataacgagctcaatctaggacgaagagaggagtacgatgttttggacaagagacgtggccgggaccctgagatggggggaaagccgagaaggaagaaccctcaggaaggcctgtacaatgaactgcagaaagataagatggcggaggcctacagtgagattgggatgaaaggcgagcgccggaggggcaaggggcacgatggcctttaccagggtctcagtacagccaccaaggacacctacgacgcccttcacatgcaggccctgccccctcgcggctctggcgagggaaggggttccctgcttacttgcggcgacgtcgaagagaatcccggtccgatggccctcccagtaactgccctccttttgcccctcgcactccttcttcatgccgctcgccccaactgggtcaacgtgattagcgatttgaagaaaatcgaggaccttatacagtctatgcatattgacgctacactgtatactgagagtgatgtacacccgtcctgtaaggtaacggccatgaaatgctttcttctggagctccaggtcatcagcttggagtctggggacgcaagcatccacgatacggttgaaaacctcatcatccttgcgaacaactctctctcatctaatggaaacgttacagagagtgggtgtaaggagtgcgaagagttggaagaaaaaaacatcaaagaatttcttcaatccttcgttcacatagtgcaaatgttcattaacacgtccactaccacacccgccccgaggccacctacgccggcaccgactatcgccagtcaacccctctctctgcgccccgaggcttgccggcctgcggctggtggggcggtccacacccggggcctggattttgcgtgcgatatatacatctgggcacctcttgccggcacctgcggagtgctgcttctctcactcgttattacgctgtactgctaagcggccgcgtcgac

SEQ ID NO: 186 - protein, 706 aa, synthetic construct
MALPVTALLLPLALLLHAARPDIQMTQSPSSLSASVGDRVTITCRASQDISKYLNWYQQKPDGTVKLLIYHTSRLHSGVPSRFSGSGSGTDYTLTISSLQPEDIATYFCQQGNTLPYTFGGGTKLEITGGGGSGGGGSGGGGSQVQLQESGPGLVKPSQTLSLTCTVSGVSLPDYGVSWIRQPPGKGLEWLGVIWGSETTYYNSALKSRLTISKDNSKSQVSLKLSSVTAADTAVYYCAKHYYYGGSYAMDYWGQGTSVTVSSTTTPAPRPPTPAPTIASQPLSLRPEACRPAAGGAVHTRGLDFACDIYIWAPLAGTCGVLLLSLVITLYCRRDQRLPPDAHKPPGGGSFRTPIQEEQADAHSTLAKIRVKFSRSADAPAYQQGQNQLYNELNLGRREEYDVLDKRRGRDPEMGGKPRRKNPQEGLYNELQKDKMAEAYSEIGMKGERRRGKGHDGLYQGLSTATKDTYDALHMQALPPRGSGEGRGSLLTCGDVEENPGPMALPVTALLLPLALLLHAARPNWVNVISDLKKIEDLIQSMHIDATLYTESDVHPSCKVTAMKCFLLELQVISLESGDASIHDTVENLIILANNSLSSNGNVTESGCKECEELEEKNIKEFLQSFVHIVQMFINTSTTTPAPRPPTPAPTIASQPLSLRPEACRPAAGGAVHTRGLDFACDIYIWAPLAGTCGVLLLSLVITLYC

SEQ ID NO: 187 - DNA, 2150 bp, synthetic construct
  source 1..2150: mol_type = other DNA
gaattcgccgccaccatggccttaccagtgaccgccttgctcctgccgctggccttgctgctccacgccgccaggccggacatccagatgacacagagcccgtcctccctgtctgcctctgtgggagacagagtcaccatcacctgcagggcaagtcaggacattagtaaatatttaaattggtatcagcagaaaccaggtggaactgttaaactcctgatctaccatacatcaagattacactcaggagtcccatcaaggttcagtggcagtgggtctggaacagatttcaccctcaccattagcagcctgcaaccggaagatattgccacttactactgccaacagggtaatacgcttccgtacacgttcggaggggggaccaagctggagatcacaggtggcggtggctcgggcggtggtgggtcgggtggcggcggatctcaggtgcagctgcaggagtcaggacctggcctggtgaaaccctcacagactctgtccgtgacatgcactgtctcaggggtctcattacccgactatggtgtaagctggattcgccagcctccaggtaagggtctggagtggctgggagtaatatggggtagtgaaaccacatactataattcagctctcaaatccagactgaccatctccaaggacaactccaagagccaagtttccttaaaattaagtagtgttactgctgctgacacagccgtctactactgtgccaaacattattactacggtggtagctatgctatggactactggggccaaggaacctcagtcaccgtctcctcaaccacgacgccagcgccgcgaccaccaacaccggcgcccaccatcgcgtcgcagcccctgtccctgcgcccagaggcgtgccggccagcggcggggggcgcagtgcacacgagggggctggacttcgcctgtgatatctacatctgggcgcccttggccgggacttgtggggtccttctcctgtcactggttatcaccctttactgccggagggaccagaggctgccccccgatgcccacaagccccctgggggaggcagtttccggacccccatccaagaggagcaggccgacgcccactccaccctggccaagatcagagtgaagttcagcaggagcgcagacgcccccgcgtaccagcagggccagaaccagctctataacgagctcaatctaggacgaagagaggagtacgatgttttggacaagagacgtggccgggaccctgagatggggggaaagccgagaaggaagaaccctcaggaaggcctgtacaatgaactgcagaaagataagatggcggaggcctacagtgagattgggatgaaaggcgagcgccggaggggcaaggggcacgatggcctttaccagggtctcagtacagccaccaaggacacctacgacgcccttcacatgcaggccctgccccctcgcggctctggcgagggaaggggttccctgcttacttgcggcgacgtcgaagagaatcccggtccgatggccctcccagtaactgccctccttttgcccctcgcactccttcttcatgccgctcgccccaactgggtcaacgtgattagcgatttgaagaaaatcgaggaccttatacagtctatgcatattgacgctacactgtatactgagagtgatgtacacccgtcctgtaaggtaacggccatgaaatgctttcttctggagctccaggtcatcagcttggagtctggggacgcaagcatccacgatacggttgaaaacctcatcatccttgcgaacaactctctctcatctaatggaaacgttacagagagtgggtgtaaggagtgcgaagagttggaagaaaaaaacatcaaagaatttcttcaatccttcgttcacatagtgcaaatgttcattaacacgtccactaccacacccgccccgaggccacctacgccggcaccgactatcgccagtcaacccctctctctgcgccccgaggcttgccggcctgcggctggtggggcggtccacacccggggcctggattttgcgtgcgatatatacatctgggcacctcttgccggcacctgcggagtgctgcttctctcactcgttattacgctgtactgctaagcggccgcgtcgac

SEQ ID NO: 188 - protein, 706 aa, synthetic construct
MALPVTALLLPLALLLHAARPDIQMTQSPSSLSASVGDRVTITCRASQDISKYLNWYQQKPGGTVKLLIYHTSRLHSGVPSRFSGSGSGTDFTLTISSLQPEDIATYYCQQGNTLPYTFGGGTKLEITGGGGSGGGGSGGGGSQVQLQESGPGLVKPSQTLSVTCTVSGVSLPDYGVSWIRQPPGKGLEWLGVIWGSETTYYNSALKSRLTISKDNSKSQVSLKLSSVTAADTAVYYCAKHYYYGGSYAMDYWGQGTSVTVSSTTTPAPRPPTPAPTIASQPLSLRPEACRPAAGGAVHTRGLDFACDIYIWAPLAGTCGVLLLSLVITLYCRRDQRLPPDAHKPPGGGSFRTPIQEEQADAHSTLAKIRVKFSRSADAPAYQQGQNQLYNELNLGRREEYDVLDKRRGRDPEMGGKPRRKNPQEGLYNELQKDKMAEAYSEIGMKGERRRGKGHDGLYQGLSTATKDTYDALHMQALPPRGSGEGRGSLLTCGDVEENPGPMALPVTALLLPLALLLHAARPNWVNVISDLKKIEDLIQSMHIDATLYTESDVHPSCKVTAMKCFLLELQVISLESGDASIHDTVENLIILANNSLSSNGNVTESGCKECEELEEKNIKEFLQSFVHIVQMFINTSTTTPAPRPPTPAPTIASQPLSLRPEACRPAAGGAVHTRGLDFACDIYIWAPLAGTCGVLLLSLVITLYC

SEQ ID NO: 189 - DNA, 2150 bp, synthetic construct
  source 1..2150: mol_type = other DNA
gaattcgccgccaccatggccttaccagtgaccgccttgctcctgccgctggccttgctgctccacgccgccaggccggacatccagatgacacagagcccgtcctccctgtctgcctctgtgggagacagagtcaccatcacctgcagggcaagtcaggacattagtaaatatttaaattggtatcagcagaaaccaggtggaactgttaaactcctgatctaccatacatcaagattacactcaggagtcccatcaaggttcagtggcagtgggtctggaacagatttcaccctcaccattagcagcctgcaaccggaagatattgccacttacttctgccaacagggtaatacgcttccgtacacgttcggaggggggaccaagctggagatcacaggtggcggtggctcgggcggtggtgggtcgggtggcggcggatctcaggtgcagctgcaggagtcaggacctggcctggtgaaaccctcacagactctgtccgtgacatgcactgtctcaggggtctcattacccgactatggtgtaagctggattcgccagcctccaggtaagggtctggagtggctgggagtaatatggggtagtgaaaccacatactataattcagctctcaaatccagactgaccatctccaaggacaactccaagagccaagtttccttaaaattaagtagtgttactgctgctgacacagccgtctactactgtgccaaacattattactacggtggtagctatgctatggactactggggccaaggaacctcagtcaccgtctcctcaaccacgacgccagcgccgcgaccaccaacaccggcgcccaccatcgcgtcgcagcccctgtccctgcgcccagaggcgtgccggccagcggcggggggcgcagtgcacacgagggggctggacttcgcctgtgatatctacatctgggcgcccttggccgggacttgtggggtccttctcctgtcactggttatcaccctttactgccggagggaccagaggctgccccccgatgcccacaagccccctgggggaggcagtttccggacccccatccaagaggagcaggccgacgcccactccaccctggccaagatcagagtgaagttcagcaggagcgcagacgcccccgcgtaccagcagggccagaaccagctctataacgagctcaatctaggacgaagagaggagtacgatgttttggacaagagacgtggccgggaccctgagatggggggaaagccgagaaggaagaaccctcaggaaggcctgtacaatgaactgcagaaagataagatggcggaggcctacagtgagattgggatgaaaggcgagcgccggaggggcaaggggcacgatggcctttaccagggtctcagtacagccaccaaggacacctacgacgcccttcacatgcaggccctgccccctcgcggctctggcgagggaaggggttccctgcttacttgcggcgacgtcgaagagaatcccggtccgatggccctcccagtaactgccctccttttgcccctcgcactccttcttcatgccgctcgccccaactgggtcaacgtgattagcgatttgaagaaaatcgaggaccttatacagtctatgcatattgacgctacactgtatactgagagtgatgtacacccgtcctgtaaggtaacggccatgaaatgctttcttctggagctccaggtcatcagcttggagtctggggacgcaagcatccacgatacggttgaaaacctcatcatccttgcgaacaactctctctcatctaatggaaacgttacagagagtgggtgtaaggagtgcgaagagttggaagaaaaaaacatcaaagaatttcttcaatccttcgttcacatagtgcaaatgttcattaacacgtccactaccacacccgccccgaggccacctacgccggcaccgactatcgccagtcaacccctctctctgcgccccgaggcttgccggcctgcggctggtggggcggtccacacccggggcctggattttgcgtgcgatatatacatctgggcacctcttgccggcacctgcggagtgctgcttctctcactcgttattacgctgtactgctaagcggccgcgtcgac

SEQ ID NO: 190 - protein, 706 aa, synthetic construct
MALPVTALLLPLALLLHAARPDIQMTQSPSSLSASVGDRVTITCRASQDISKYLNWYQQKPGGTVKLLIYHTSRLHSGVPSRFSGSGSGTDFTLTISSLQPEDIATYFCQQGNTLPYTFGGGTKLEITGGGGSGGGGSGGGGSQVQLQESGPGLVKPSQTLSVTCTVSGVSLPDYGVSWIRQPPGKGLEWLGVIWGSETTYYNSALKSRLTISKDNSKSQVSLKLSSVTAADTAVYYCAKHYYYGGSYAMDYWGQGTSVTVSSTTTPAPRPPTPAPTIASQPLSLRPEACRPAAGGAVHTRGLDFACDIYIWAPLAGTCGVLLLSLVITLYCRRDQRLPPDAHKPPGGGSFRTPIQEEQADAHSTLAKIRVKFSRSADAPAYQQGQNQLYNELNLGRREEYDVLDKRRGRDPEMGGKPRRKNPQEGLYNELQKDKMAEAYSEIGMKGERRRGKGHDGLYQGLSTATKDTYDALHMQALPPRGSGEGRGSLLTCGDVEENPGPMALPVTALLLPLALLLHAARPNWVNVISDLKKIEDLIQSMHIDATLYTESDVHPSCKVTAMKCFLLELQVISLESGDASIHDTVENLIILANNSLSSNGNVTESGCKECEELEEKNIKEFLQSFVHIVQMFINTSTTTPAPRPPTPAPTIASQPLSLRPEACRPAAGGAVHTRGLDFACDIYIWAPLAGTCGVLLLSLVITLYC

SEQ ID NO: 191 - DNA, 2150 bp, synthetic construct
  source 1..2150: mol_type = other DNA
gaattcgccgccaccatggccttaccagtgaccgccttgctcctgccgctggccttgctgctccacgccgccaggccggacatccagatgacacagagcccgtcctccctgtctgcctctgtgggagacagagtcaccatcacctgcagggcaagtcaggacattagtaaatatttaaattggtatcagcagaaaccagacggaactgttaaactcctgatctaccatacatcaagattacactcaggagtcccatcaaggttcagtggcagtgggtctggaacagattacaccctcaccattagcagcctgcaaccggaagatattgccacttacttctgccaacagggtaatacgcttccgtacacgttcggaggggggaccaagctggagatcacaggtggcggtggctcgggcggtggtgggtcgggtggcggcggatctcaggtgcagctgcaggagtcaggacctggcctggtgaaaccctcacagactctgtccgtgacatgcactgtctcaggggtctcattacccgactatggtgtaagctggattcgccagcctccaggtaagggtctggagtggctgggagtaatatggggtagtgaaaccacatactataattcagctctcaaatccagactgaccatctccaaggacaactccaagagccaagtttccttaaaattaagtagtgttactgctgctgacacagccgtctactactgtgccaaacattattactacggtggtagctatgctatggactactggggccaaggaacctcagtcaccgtctcctcaaccacgacgccagcgccgcgaccaccaacaccggcgcccaccatcgcgtcgcagcccctgtccctgcgcccagaggcgtgccggccagcggcggggggcgcagtgcacacgagggggctggacttcgcctgtgatatctacatctgggcgcccttggccgggacttgtggggtccttctcctgtcactggttatcaccctttactgccggagggaccagaggctgccccccgatgcccacaagccccctgggggaggcagtttccggacccccatccaagaggagcaggccgacgcccactccaccctggccaagatcagagtgaagttcagcaggagcgcagacgcccccgcgtaccagcagggccagaaccagctctataacgagctcaatctaggacgaagagaggagtacgatgttttggacaagagacgtggccgggaccctgagatggggggaaagccgagaaggaagaaccctcaggaaggcctgtacaatgaactgcagaaagataagatggcggaggcctacagtgagattgggatgaaaggcgagcgccggaggggcaaggggcacgatggcctttaccagggtctcagtacagccaccaaggacacctacgacgcccttcacatgcaggccctgccccctcgcggctctggcgagggaaggggttccctgcttacttgcggcgacgtcgaagagaatcccggtccgatggccctcccagtaactgccctccttttgcccctcgcactccttcttcatgccgctcgccccaactgggtcaacgtgattagcgatttgaagaaaatcgaggaccttatacagtctatgcatattgacgctacactgtatactgagagtgatgtacacccgtcctgtaaggtaacggccatgaaatgctttcttctggagctccaggtcatcagcttggagtctggggacgcaagcatccacgatacggttgaaaacctcatcatccttgcgaacaactctctctcatctaatggaaacgttacagagagtgggtgtaaggagtgcgaagagttggaagaaaaaaacatcaaagaatttcttcaatccttcgttcacatagtgcaaatgttcattaacacgtccactaccacacccgccccgaggccacctacgccggcaccgactatcgccagtcaacccctctctctgcgccccgaggcttgccggcctgcggctggtggggcggtccacacccggggcctggattttgcgtgcgatatatacatctgggcacctcttgccggcacctgcggagtgctgcttctctcactcgttattacgctgtactgctaagcggccgcgtcgac

SEQ ID NO: 192 - protein, 706 aa, synthetic construct
MALPVTALLLPLALLLHAARPDIQMTQSPSSLSASVGDRVTITCRASQDISKYLNWYQQKPDGTVKLLIYHTSRLHSGVPSRFSGSGSGTDYTLTISSLQPEDIATYFCQQGNTLPYTFGGGTKLEITGGGGSGGGGSGGGGSQVQLQESGPGLVKPSQTLSVTCTVSGVSLPDYGVSWIRQPPGKGLEWLGVIWGSETTYYNSALKSRLTISKDNSKSQVSLKLSSVTAADTAVYYCAKHYYYGGSYAMDYWGQGTSVTVSSTTTPAPRPPTPAPTIASQPLSLRPEACRPAAGGAVHTRGLDFACDIYIWAPLAGTCGVLLLSLVITLYCRRDQRLPPDAHKPPGGGSFRTPIQEEQADAHSTLAKIRVKFSRSADAPAYQQGQNQLYNELNLGRREEYDVLDKRRGRDPEMGGKPRRKNPQEGLYNELQKDKMAEAYSEIGMKGERRRGKGHDGLYQGLSTATKDTYDALHMQALPPRGSGEGRGSLLTCGDVEENPGPMALPVTALLLPLALLLHAARPNWVNVISDLKKIEDLIQSMHIDATLYTESDVHPSCKVTAMKCFLLELQVISLESGDASIHDTVENLIILANNSLSSNGNVTESGCKECEELEEKNIKEFLQSFVHIVQMFINTSTTTPAPRPPTPAPTIASQPLSLRPEACRPAAGGAVHTRGLDFACDIYIWAPLAGTCGVLLLSLVITLYC

SEQ ID NO: 193 - DNA, 2150 bp, synthetic construct
  source 1..2150: mol_type = other DNA
gaattcgccgccaccatggccttaccagtgaccgccttgctcctgccgctggccttgctgctccacgccgccaggccggatattcagatgacccagagcccgagcagcctgagcgcgagcgtgggcgatcgcgtgaccattacctgccgcgcgagccaggatattagcaaatatctgaactggtatcagcagaaaccgggcggcaccgtgaaactgctgatttatcataccagccgcctgcatagcggcgtgccgagccgctttagcggcagcggcagcggcaccgattttaccctgaccattagcagcctgcagccggaagatattgcgacctattattgccagcagggcaacaccctgccgtatacctttggcggcggcaccaaactggaaattaccggtggcggtggctcgggcggtggtgggtcgggtggcggcggatctcaggtgcagctgcaggaaagcggcccgggcctggtgaaaccgagccagaccctgagcgtgacctgcaccgtgagcggcgtgagcctgccggattatggcgtgagctggattcgccagccgccgcgcaaaggcctggaatggctgggcgtgatttggggcagcgaaaccacctattataacagcgcgctgaaaagccgcctgaccattagcaaagataacagcaaaagccaggtgagcctgaaaatgagcagcgtgaccgcggcggataccgcgatttattattgcgcgaaacattattattatggcggcagctatgcgatggattattggggccagggcaccagcgtgaccgtgagcagcaccacgacgccagcgccgcgaccaccaacaccggcgcccaccatcgcgtcgcagcccctgtccctgcgcccagaggcgtgccggccagcggcggggggcgcagtgcacacgagggggctggacttcgcctgtgatatctacatctgggcgcccttggccgggacttgtggggtccttctcctgtcactggttatcaccctttactgccggagggaccagaggctgccccccgatgcccacaagccccctgggggaggcagtttccggacccccatccaagaggagcaggccgacgcccactccaccctggccaagatcagagtgaagttcagcaggagcgcagacgcccccgcgtaccagcagggccagaaccagctctataacgagctcaatctaggacgaagagaggagtacgatgttttggacaagagacgtggccgggaccctgagatggggggaaagccgagaaggaagaaccctcaggaaggcctgtacaatgaactgcagaaagataagatggcggaggcctacagtgagattgggatgaaaggcgagcgccggaggggcaaggggcacgatggcctttaccagggtctcagtacagccaccaaggacacctacgacgcccttcacatgcaggccctgccccctcgcggctctggcgagggaaggggttccctgcttacttgcggcgacgtcgaagagaatcccggtccgatggccctcccagtaactgccctccttttgcccctcgcactccttcttcatgccgctcgccccaactgggtcaacgtgattagcgatttgaagaaaatcgaggaccttatacagtctatgcatattgacgctacactgtatactgagagtgatgtacacccgtcctgtaaggtaacggccatgaaatgctttcttctggagctccaggtcatcagcttggagtctggggacgcaagcatccacgatacggttgaaaacctcatcatccttgcgaacaactctctctcatctaatggaaacgttacagagagtgggtgtaaggagtgcgaagagttggaagaaaaaaacatcaaagaatttcttcaatccttcgttcacatagtgcaaatgttcattaacacgtccactaccacacccgccccgaggccacctacgccggcaccgactatcgccagtcaacccctctctctgcgccccgaggcttgccggcctgcggctggtggggcggtccacacccggggcctggattttgcgtgcgatatatacatctgggcacctcttgccggcacctgcggagtgctgcttctctcactcgttattacgctgtactgctaagcggccgcgtcgac

SEQ ID NO: 194 - protein, 706 aa, synthetic construct
MALPVTALLLPLALLLHAARPDIQMTQSPSSLSASVGDRVTITCRASQDISKYLNWYQQKPGGTVKLLIYHTSRLHSGVPSRFSGSGSGTDFTLTISSLQPEDIATYYCQQGNTLPYTFGGGTKLEITGGGGSGGGGSGGGGSQVQLQESGPGLVKPSQTLSVTCTVSGVSLPDYGVSWIRQPPRKGLEWLGVIWGSETTYYNSALKSRLTISKDNSKSQVSLKMSSVTAADTAIYYCAKHYYYGGSYAMDYWGQGTSVTVSSTTTPAPRPPTPAPTIASQPLSLRPEACRPAAGGAVHTRGLDFACDIYIWAPLAGTCGVLLLSLVITLYCRRDQRLPPDAHKPPGGGSFRTPIQEEQADAHSTLAKIRVKFSRSADAPAYQQGQNQLYNELNLGRREEYDVLDKRRGRDPEMGGKPRRKNPQEGLYNELQKDKMAEAYSEIGMKGERRRGKGHDGLYQGLSTATKDTYDALHMQALPPRGSGEGRGSLLTCGDVEENPGPMALPVTALLLPLALLLHAARPNWVNVISDLKKIEDLIQSMHIDATLYTESDVHPSCKVTAMKCFLLELQVISLESGDASIHDTVENLIILANNSLSSNGNVTESGCKECEELEEKNIKEFLQSFVHIVQMFINTSTTTPAPRPPTPAPTIASQPLSLRPEACRPAAGGAVHTRGLDFACDIYIWAPLAGTCGVLLLSLVITLYC

SEQ ID NO: 195 - DNA, 2150 bp, synthetic construct
  source 1..2150: mol_type = other DNA
gaattcgccgccaccatggccttaccagtgaccgccttgctcctgccgctggccttgctgctccacgccgccaggccggatattcagatgacccagagcccgagcagcctgagcgcgagcgtgggcgatcgcgtgaccattacctgccgcgcgagccaggatattagcaaatatctgaactggtatcagcagaaaccgggcggcaccgtgaaactgctgatttatcataccagccgcctgcatagcggcgtgccgagccgctttagcggcagcggcagcggcaccgattttaccctgaccattagcagcctgcagccggaagatattgcgacctatttttgccagcagggcaacaccctgccgtatacctttggcggcggcaccaaactggaaattaccggtggcggtggctcgggcggtggtgggtcgggtggcggcggatctcaggtgcagctgcaggaaagcggcccgggcctggtgaaaccgagccagaccctgagcgtgacctgcaccgtgagcggcgtgagcctgccggattatggcgtgagctggattcgccagccgccgcgcaaaggcctggaatggctgggcgtgatttggggcagcgaaaccacctattataacagcgcgctgaaaagccgcctgaccattagcaaagataacagcaaaagccaggtgagcctgaaaatgagcagcgtgaccgcggcggataccgcgatttattattgcgcgaaacattattattatggcggcagctatgcgatggattattggggccagggcaccagcgtgaccgtgagcagcaccacgacgccagcgccgcgaccaccaacaccggcgcccaccatcgcgtcgcagcccctgtccctgcgcccagaggcgtgccggccagcggcggggggcgcagtgcacacgagggggctggacttcgcctgtgatatctacatctgggcgcccttggccgggacttgtggggtccttctcctgtcactggttatcaccctttactgccggagggaccagaggctgccccccgatgcccacaagccccctgggggaggcagtttccggacccccatccaagaggagcaggccgacgcccactccaccctggccaagatcagagtgaagttcagcaggagcgcagacgcccccgcgtaccagcagggccagaaccagctctataacgagctcaatctaggacgaagagaggagtacgatgttttggacaagagacgtggccgggaccctgagatggggggaaagccgagaaggaagaaccctcaggaaggcctgtacaatgaactgcagaaagataagatggcggaggcctacagtgagattgggatgaaaggcgagcgccggaggggcaaggggcacgatggcctttaccagggtctcagtacagccaccaaggacacctacgacgcccttcacatgcaggccctgccccctcgcggctctggcgagggaaggggttccctgcttacttgcggcgacgtcgaagagaatcccggtccgatggccctcccagtaactgccctccttttgcccctcgcactccttcttcatgccgctcgccccaactgggtcaacgtgattagcgatttgaagaaaatcgaggaccttatacagtctatgcatattgacgctacactgtatactgagagtgatgtacacccgtcctgtaaggtaacggccatgaaatgctttcttctggagctccaggtcatcagcttggagtctggggacgcaagcatccacgatacggttgaaaacctcatcatccttgcgaacaactctctctcatctaatggaaacgttacagagagtgggtgtaaggagtgcgaagagttggaagaaaaaaacatcaaagaatttcttcaatccttcgttcacatagtgcaaatgttcattaacacgtccactaccacacccgccccgaggccacctacgccggcaccgactatcgccagtcaacccctctctctgcgccccgaggcttgccggcctgcggctggtggggcggtccacacccggggcctggattttgcgtgcgatatatacatctgggcacctcttgccggcacctgcggagtgctgcttctctcactcgttattacgctgtactgctaagcggccgcgtcgac

SEQ ID NO: 196 - protein, 706 aa, synthetic construct
MALPVTALLLPLALLLHAARPDIQMTQSPSSLSASVGDRVTITCRASQDISKYLNWYQQKPGGTVKLLIYHTSRLHSGVPSRFSGSGSGTDFTLTISSLQPEDIATYFCQQGNTLPYTFGGGTKLEITGGGGSGGGGSGGGGSQVQLQESGPGLVKPSQTLSVTCTVSGVSLPDYGVSWIRQPPRKGLEWLGVIWGSETTYYNSALKSRLTISKDNSKSQVSLKMSSVTAADTAIYYCAKHYYYGGSYAMDYWGQGTSVTVSSTTTPAPRPPTPAPTIASQPLSLRPEACRPAAGGAVHTRGLDFACDIYIWAPLAGTCGVLLLSLVITLYCRRDQRLPPDAHKPPGGGSFRTPIQEEQADAHSTLAKIRVKFSRSADAPAYQQGQNQLYNELNLGRREEYDVLDKRRGRDPEMGGKPRRKNPQEGLYNELQKDKMAEAYSEIGMKGERRRGKGHDGLYQGLSTATKDTYDALHMQALPPRGSGEGRGSLLTCGDVEENPGPMALPVTALLLPLALLLHAARPNWVNVISDLKKIEDLIQSMHIDATLYTESDVHPSCKVTAMKCFLLELQVISLESGDASIHDTVENLIILANNSLSSNGNVTESGCKECEELEEKNIKEFLQSFVHIVQMFINTSTTTPAPRPPTPAPTIASQPLSLRPEACRPAAGGAVHTRGLDFACDIYIWAPLAGTCGVLLLSLVITLYC

SEQ ID NO: 197 - DNA, 2150 bp, synthetic construct
  source 1..2150: mol_type = other DNA
gaattcgccgccaccatggccttaccagtgaccgccttgctcctgccgctggccttgctgctccacgccgccaggccggatattcagatgacccagagcccgagcagcctgagcgcgagcgtgggcgatcgcgtgaccattacctgccgcgcgagccaggatattagcaaatatctgaactggtatcagcagaaaccggatggcaccgtgaaactgctgatttatcataccagccgcctgcatagcggcgtgccgagccgctttagcggcagcggcagcggcaccgattataccctgaccattagcagcctgcagccggaagatattgcgacctatttttgccagcagggcaacaccctgccgtatacctttggcggcggcaccaaactggaaattaccggtggcggtggctcgggcggtggtgggtcgggtggcggcggatctcaggtgcagctgcaggaaagcggcccgggcctggtgaaaccgagccagaccctgagcgtgacctgcaccgtgagcggcgtgagcctgccggattatggcgtgagctggattcgccagccgccgcgcaaaggcctggaatggctgggcgtgatttggggcagcgaaaccacctattataacagcgcgctgaaaagccgcctgaccattagcaaagataacagcaaaagccaggtgagcctgaaaatgagcagcgtgaccgcggcggataccgcgatttattattgcgcgaaacattattattatggcggcagctatgcgatggattattggggccagggcaccagcgtgaccgtgagcagcaccacgacgccagcgccgcgaccaccaacaccggcgcccaccatcgcgtcgcagcccctgtccctgcgcccagaggcgtgccggccagcggcggggggcgcagtgcacacgagggggctggacttcgcctgtgatatctacatctgggcgcccttggccgggacttgtggggtccttctcctgtcactggttatcaccctttactgccggagggaccagaggctgccccccgatgcccacaagccccctgggggaggcagtttccggacccccatccaagaggagcaggccgacgcccactccaccctggccaagatcagagtgaagttcagcaggagcgcagacgcccccgcgtaccagcagggccagaaccagctctataacgagctcaatctaggacgaagagaggagtacgatgttttggacaagagacgtggccgggaccctgagatggggggaaagccgagaaggaagaaccctcaggaaggcctgtacaatgaactgcagaaagataagatggcggaggcctacagtgagattgggatgaaaggcgagcgccggaggggcaaggggcacgatggcctttaccagggtctcagtacagccaccaaggacacctacgacgcccttcacatgcaggccctgccccctcgcggctctggcgagggaaggggttccctgcttacttgcggcgacgtcgaagagaatcccggtccgatggccctcccagtaactgccctccttttgcccctcgcactccttcttcatgccgctcgccccaactgggtcaacgtgattagcgatttgaagaaaatcgaggaccttatacagtctatgcatattgacgctacactgtatactgagagtgatgtacacccgtcctgtaaggtaacggccatgaaatgctttcttctggagctccaggtcatcagcttggagtctggggacgcaagcatccacgatacggttgaaaacctcatcatccttgcgaacaactctctctcatctaatggaaacgttacagagagtgggtgtaaggagtgcgaagagttggaagaaaaaaacatcaaagaatttcttcaatccttcgttcacatagtgcaaatgttcattaacacgtccactaccacacccgccccgaggccacctacgccggcaccgactatcgccagtcaacccctctctctgcgccccgaggcttgccggcctgcggctggtggggcggtccacacccggggcctggattttgcgtgcgatatatacatctgggcacctcttgccggcacctgcggagtgctgcttctctcactcgttattacgctgtactgctaagcggccgcgtcgac

SEQ ID NO: 198 - protein, 706 aa, synthetic construct
MALPVTALLLPLALLLHAARPDIQMTQSPSSLSASVGDRVTITCRASQDISKYLNWYQQKPDGTVKLLIYHTSRLHSGVPSRFSGSGSGTDYTLTISSLQPEDIATYFCQQGNTLPYTFGGGTKLEITGGGGSGGGGSGGGGSQVQLQESGPGLVKPSQTLSVTCTVSGVSLPDYGVSWIRQPPRKGLEWLGVIWGSETTYYNSALKSRLTISKDNSKSQVSLKMSSVTAADTAIYYCAKHYYYGGSYAMDYWGQGTSVTVSSTTTPAPRPPTPAPTIASQPLSLRPEACRPAAGGAVHTRGLDFACDIYIWAPLAGTCGVLLLSLVITLYCRRDQRLPPDAHKPPGGGSFRTPIQEEQADAHSTLAKIRVKFSRSADAPAYQQGQNQLYNELNLGRREEYDVLDKRRGRDPEMGGKPRRKNPQEGLYNELQKDKMAEAYSEIGMKGERRRGKGHDGLYQGLSTATKDTYDALHMQALPPRGSGEGRGSLLTCGDVEENPGPMALPVTALLLPLALLLHAARPNWVNVISDLKKIEDLIQSMHIDATLYTESDVHPSCKVTAMKCFLLELQVISLESGDASIHDTVENLIILANNSLSSNGNVTESGCKECEELEEKNIKEFLQSFVHIVQMFINTSTTTPAPRPPTPAPTIASQPLSLRPEACRPAAGGAVHTRGLDFACDIYIWAPLAGTCGVLLLSLVITLYC

SEQ ID NO: 199 - RNA, 20 nt, synthetic construct
  source 1..20: mol_type = other RNA
cgcgagcacagctaaggcca

SEQ ID NO: 200 - RNA, 20 nt, synthetic construct
  source 1..20: mol_type = other RNA
gagtagcgcgagcacagcta

SEQ ID NO: 201 - RNA, 20 nt, synthetic construct
  source 1..20: mol_type = other RNA
gctactctctctttctggcc

SEQ ID NO: 202 - RNA, 20 nt, synthetic construct
  source 1..20: mol_type = other RNA
ggccgagatgtctcgctccg

SEQ ID NO: 203 - RNA, 20 nt, synthetic construct
  source 1..20: mol_type = other RNA
ggccacggagcgagacatct

SEQ ID NO: 204 - RNA, 20 nt, synthetic construct
  source 1..20: mol_type = other RNA
cacagcccaagatagttaag

SEQ ID NO: 205 - RNA, 20 nt, synthetic construct
  source 1..20: mol_type = other RNA
agtcacatggttcacacggc

SEQ ID NO: 206 - RNA, 20 nt, synthetic construct
  source 1..20: mol_type = other RNA
aagtcaacttcaatgtcgga

SEQ ID NO: 207 - RNA, 20 nt, synthetic construct
  source 1..20: mol_type = other RNA
acttgtctttcagcaaggac

SEQ ID NO: 208 - RNA, 20 nt, synthetic construct
  source 1..20: mol_type = other RNA
tgggctgtgacaaagtcaca

SEQ ID NO: 209 - DNA, 2115 bp, synthetic construct
  source 1..2115: mol_type = other DNA
atggccttaccagtgaccgccttgctcctgccgctggccttgctgctccacgccgccaggccgcaggtgcagctggtgcagtctggggctgaggtgaagaagcctggggcctcagtgaaggtctcctgcaaggcttctggatacaccttcaccggccattatttgcactgggtgcgacaggcccctggacaagggcttgagtggatgggatggatcaaccctaacagtggtggcacaaactatgcacagaagtttcagggcagggtcaccatgaccagggacacgtccactagcacagtgtacatggagctgagcagcctgagatctgaggacacggccgtgtattactgtgttagaggaagcggttggtatgacctggactactggggccaagggaccctggtcaccgtctcctcaggtggaggcggttcaggcggaggtggctctggcggtggcggatcggacatccagatgacccagtctccatcctccctgtctgcatctgtaggagacagagtcaccatcacttgccgggcaagtcagaatattggcacatatttagcttggtatcagcagaaaccagggaaagcccctaagctcctgatctatgacgcatccaacttggagactggggtcccatcaaggttcagtggcagtggatctgggacagatttcactctcaccatcagcagtctgcaacctgaagattttgcaacttactactgtcaacagagttacagaatccctctcaccttcggccaagggacacgactggagattaaaaccacgacgccagcgccgcggccaccaacaccggcgcccaccatcgcgtcgcagcccctgtccctgcgcccagaggcgtgccggccagcggcggggggcgcagtgcacacgagggggctggacttcgcctgtgatatctacatctgggcgcccttggccgggacttgtggggtccttctcctgtcactggttatcaccctttactgccggagggaccagaggctgccccccgatgcccacaagccccctgggggaggcagtttccggacccccatccaagaggagcaggccgacgcccactccaccctggccaagatcagagtgaagttcagcaggagcgcagacgcccccgcgtaccagcagggccagaaccagctctataacgagctcaatctaggacgaagagaggagtacgatgttttggacaagagacgtggccgggaccctgagatggggggaaagccgagaaggaagaaccctcaggaaggcctgtacaatgaactgcagaaagataagatggcggaggcctacagtgagattgggatgaaaggcgagcgccggaggggcaaggggcacgatggcctttaccagggtctcagtacagccaccaaggacacctacgacgcccttcacatgcaggccctgccccctcgcggctctggcgagggaaggggttccctgcttacttgcggcgacgtcgaagagaatcccggtccgatggccctcccagtaactgccctccttttgcccctcgcactccttcttcatgccgctcgccccaactgggtcaacgtgattagcgatttgaagaaaatcgaggaccttatacagtctatgcatattgacgctacactgtatactgagagtgatgtacacccgtcctgtaaggtaacggccatgaaatgctttcttctggagctccaggtcatcagcttggagtctggggacgcaagcatccacgatacggttgaaaacctcatcatccttgcgaacaactctctctcatctaatggaaacgttacagagagtgggtgtaaggagtgcgaagagttggaagaaaaaaacatcaaagaatttcttcaatccttcgttcacatagtgcaaatgttcattaacacgtccactaccacacccgccccgaggccacctacgccggcaccgactatcgccagtcaacccctctctctgcgccccgaggcttgccggcctgcggctggtggggcggtccacacccggggcctggattttgcgtgcgatatatacatctgggcacctcttgccggcacctgcggagtgctgcttctctcactcgttattacgctgtactgctaa

SEQ ID NO: 210 - DNA, 2118 bp, synthetic construct
  source 1..2118: mol_type = other DNA
atggccttaccagtgaccgccttgctcctgccgctggccttgctgctccacgccgccaggccgcaggtgcagctggtgcagtctggggctgaggtgaagaagcctggggcctcagtgaaggtttcctgcaaggcatctggatacaccttcaccaactactatatgcactgggtgcgacaggcccctggacaagggcttgagtggatgggaataatcaaccctagtggtgggagcacaagctacgcacagaagttccagggcagagtcaccatgaccagggacacgtccacgagcacagtctacatggagctgagcagcctgagatctgaggacacggccgtgtattactgtgctagagaactaggagtcgccgggtacttcgatctctggggccgtggcaccctggtcactgtctcctcaggtggaggcggttcaggcggaggtggctctggcggtggcggatcggacatccagatgacccagtctccatcctccctgtctgcatctgtaggagacagagtcaccatcacttgccgggcgagtcagaggattagcaattggttagcctggtatcagcagaaaccagggaaagcccctaagctcctgatctatgatgcatccaacttggaaaccggggtcccatccaggttcagtggcagtggatctgggacggattttactctcaccatcagcagcctgcagcctgaagattttgcaacttattactgtcaacagacctatagtcctccccctacttttggccaggggaccaagctggagatcaaaaccacgacgccagcgccgcggccaccaacaccggcgcccaccatcgcgtcgcagcccctgtccctgcgcccagaggcgtgccggccagcggcggggggcgcagtgcacacgagggggctggacttcgcctgtgatatctacatctgggcgcccttggccgggacttgtggggtccttctcctgtcactggttatcaccctttactgccggagggaccagaggctgccccccgatgcccacaagccccctgggggaggcagtttccggacccccatccaagaggagcaggccgacgcccactccaccctggccaagatcagagtgaagttcagcaggagcgcagacgcccccgcgtaccagcagggccagaaccagctctataacgagctcaatctaggacgaagagaggagtacgatgttttggacaagagacgtggccgggaccctgagatggggggaaagccgagaaggaagaaccctcaggaaggcctgtacaatgaactgcagaaagataagatggcggaggcctacagtgagattgggatgaaaggcgagcgccggaggggcaaggggcacgatggcctttaccagggtctcagtacagccaccaaggacacctacgacgcccttcacatgcaggccctgccccctcgcggctctggcgagggaaggggttccctgcttacttgcggcgacgtcgaagagaatcccggtccgatggccctcccagtaactgccctccttttgcccctcgcactccttcttcatgccgctcgccccaactgggtcaacgtgattagcgatttgaagaaaatcgaggaccttatacagtctatgcatattgacgctacactgtatactgagagtgatgtacacccgtcctgtaaggtaacggccatgaaatgctttcttctggagctccaggtcatcagcttggagtctggggacgcaagcatccacgatacggttgaaaacctcatcatccttgcgaacaactctctctcatctaatggaaacgttacagagagtgggtgtaaggagtgcgaagagttggaagaaaaaaacatcaaagaatttcttcaatccttcgttcacatagtgcaaatgttcattaacacgtccactaccacacccgccccgaggccacctacgccggcaccgactatcgccagtcaacccctctctctgcgccccgaggcttgccggcctgcggctggtggggcggtccacacccggggcctggattttgcgtgcgatatatacatctgggcacctcttgccggcacctgcggagtgctgcttctctcactcgttattacgctgtactgctaa

SEQ ID NO: 211 - DNA, 2145 bp, synthetic construct
  source 1..2145: mol_type = other DNA
atggccttaccagtgaccgccttgctcctgccgctggccttgctgctccacgccgccaggccgcaggtgcagctggtgcagtctggggctgaggtgaagaagcctggggcctcagtgaaggtttcctgcaaggcatctggatacaccttcaccggttactatatccactgggtgcgacaggcccctggacaagggcttgagtggatgggaataatcaaccctagtggtggaagcacaagctacgcacagaagttccagggcagagtcaccatgaccagggacacgtccacgagcacagtctacatggagctgagcagcctgagatctgaggacacggccgtgtattactgtgctagagacctgtcagggatcgacggatatattggtttctttgactactggggccaagggaccctggtcaccgtctcctcaggtggaggcggttcaggcggaggtggctctggcggtggcggatcggatattgtgatgactcagtctccactctccctgcccgtcacccctggagagccggcctccatctcctgcaggtctagtcagagcctcctgcactctaacggatacaactatttggattggtacctgcagaagccagggcagtctccacagctcctgatctatgcagcctcttcattacaatccggggtccctgacaggttcagtggcagtggatcaggcacagattttacactgaaaatcagcagagtggaggctgaggatgttggggtttattactgcatgcaagctctacaaactcctatcaccttcggccaagggacacgactggagattaaaaccacgacgccagcgccgcggccaccaacaccggcgcccaccatcgcgtcgcagcccctgtccctgcgcccagaggcgtgccggccagcggcggggggcgcagtgcacacgagggggctggacttcgcctgtgatatctacatctgggcgcccttggccgggacttgtggggtccttctcctgtcactggttatcaccctttactgccggagggaccagaggctgccccccgatgcccacaagccccctgggggaggcagtttccggacccccatccaagaggagcaggccgacgcccactccaccctggccaagatcagagtgaagttcagcaggagcgcagacgcccccgcgtaccagcagggccagaaccagctctataacgagctcaatctaggacgaagagaggagtacgatgttttggacaagagacgtggccgggaccctgagatggggggaaagccgagaaggaagaaccctcaggaaggcctgtacaatgaactgcagaaagataagatggcggaggcctacagtgagattgggatgaaaggcgagcgccggaggggcaaggggcacgatggcctttaccagggtctcagtacagccaccaaggacacctacgacgcccttcacatgcaggccctgccccctcgcggctctggcgagggaaggggttccctgcttacttgcggcgacgtcgaagagaatcccggtccgatggccctcccagtaactgccctccttttgcccctcgcactccttcttcatgccgctcgccccaactgggtcaacgtgattagcgatttgaagaaaatcgaggaccttatacagtctatgcatattgacgctacactgtatactgagagtgatgtacacccgtcctgtaaggtaacggccatgaaatgctttcttctggagctccaggtcatcagcttggagtctggggacgcaagcatccacgatacggttgaaaacctcatcatccttgcgaacaactctctctcatctaatggaaacgttacagagagtgggtgtaaggagtgcgaagagttggaagaaaaaaacatcaaagaatttcttcaatccttcgttcacatagtgcaaatgttcattaacacgtccactaccacacccgccccgaggccacctacgccggcaccgactatcgccagtcaacccctctctctgcgccccgaggcttgccggcctgcggctggtggggcggtccacacccggggcctggattttgcgtgcgatatatacatctgggcacctcttgccggcacctgcggagtgctgcttctctcactcgttattacgctgtactgctaa

SEQ ID NO: 212 - DNA, 2118 bp, synthetic construct
  source 1..2118: mol_type = other DNA
atggccttaccagtgaccgccttgctcctgccgctggccttgctgctccacgccgccaggccgcaggtgcagctggtgcagtctggggctgaggtgaagaagcctggggcctcagtgaaggtttcctgcaaggcatctggaggaaccttcagaagccatgtcatatcctgggtgcgacaggcccctggacaagggcttgagtggatgggaataatcgatcctagtggtggcagcacaagctacgcacagaggttccagggcagagtcaccatgaccagggacacgtccacgagcacagtctacatggagctgagcagcctgagatctgaggacacggccgtgtattactgtgctaaagattacactgggctgcttggaatggatgtctggggccaagggacaaccgtcaccgtctcttcaggtggaggcggttcaggcggaggtggctctggcggtggcggatcggacatccagatgacccagtctccatcctccctgtctgcatctgtaggagacagagtcaccatcacttgccgggcaagtcaggacattgacacctatttagcctggtatcagcagaaaccagggaaagcccctaagctcctgatctatgctgcatccagtttgcaaagtggggtcccatcaaggttcagtggcagtggatctgggacagatttcactctcaccatcagcagtctgcaacctgaagattttgcaacttactactgtcaacagagttacacaacccctttcacgttcggccaagggaccaaggtggaaatcaaaaccacgacgccagcgccgcggccaccaacaccggcgcccaccatcgcgtcgcagcccctgtccctgcgcccagaggcgtgccggccagcggcggggggcgcagtgcacacgagggggctggacttcgcctgtgatatctacatctgggcgcccttggccgggacttgtggggtccttctcctgtcactggttatcaccctttactgccggagggaccagaggctgccccccgatgcccacaagccccctgggggaggcagtttccggacccccatccaagaggagcaggccgacgcccactccaccctggccaagatcagagtgaagttcagcaggagcgcagacgcccccgcgtaccagcagggccagaaccagctctataacgagctcaatctaggacgaagagaggagtacgatgttttggacaagagacgtggccgggaccctgagatggggggaaagccgagaaggaagaaccctcaggaaggcctgtacaatgaactgcagaaagataagatggcggaggcctacagtgagattgggatgaaaggcgagcgccggaggggcaaggggcacgatggcctttaccagggtctcagtacagccaccaaggacacctacgacgcccttcacatgcaggccctgccccctcgcggctctggcgagggaaggggttccctgcttacttgcggcgacgtcgaagagaatcccggtccgatggccctcccagtaactgccctccttttgcccctcgcactccttcttcatgccgctcgccccaactgggtcaacgtgattagcgatttgaagaaaatcgaggaccttatacagtctatgcatattgacgctacactgtatactgagagtgatgtacacccgtcctgtaaggtaacggccatgaaatgctttcttctggagctccaggtcatcagcttggagtctggggacgcaagcatccacgatacggttgaaaacctcatcatccttgcgaacaactctctctcatctaatggaaacgttacagagagtgggtgtaaggagtgcgaagagttggaagaaaaaaacatcaaagaatttcttcaatccttcgttcacatagtgcaaatgttcattaacacgtccactaccacacccgccccgaggccacctacgccggcaccgactatcgccagtcaacccctctctctgcgccccgaggcttgccggcctgcggctggtggggcggtccacacccggggcctggattttgcgtgcgatatatacatctgggcacctcttgccggcacctgcggagtgctgcttctctcactcgttattacgctgtactgctaa

SEQ ID NO: 213 - DNA, 2118 bp, synthetic construct
  source 1..2118: mol_type = other DNA
atggccttaccagtgaccgccttgctcctgccgctggccttgctgctccacgccgccaggccgcaggtgcagctggtgcagtctggggctgaggtgaagaagcctggggcctcagtgaaggtctcctgcaaggcttctggatacaccttcatcgactattatatccattgggtgcgacaggcccctggacaagggcttgagtggatgggatggatgaaccccaacagtggtaacacaggctatgcacagaagttccagggcagagtcaccatgaccagggacacctccacaagcacagtctacatggagctgagcagcctgagatctgaggacacggccgtgtattactgtgcgagaggcctttccggctacgacttggacgactactggggccaagggaccctggtcaccgtctcctcaggtggaggcggttcaggcggaggtggctctggcggtggcggatcggacatccagatgacccagtctccatcctccctgtctgcatctgtaggagacagagtcaccatcacttgccaggcaagtcaggacattagcaactatttaaattggtatcagcagaaaccagggaaagcccctaagctcctgatctatgatgcatccagtttggaaagtggggtcccatcaaggttcagtggcagtggatctgggacagatttcactctcaccatcagcagtctgcaacctgaagattttgcaacttactactgtcaacagagttaccgatcacctctcactttcggcggagggaccaaggtggagatcaaaaccacgacgccagcgccgcggccaccaacaccggcgcccaccatcgcgtcgcagcccctgtccctgcgcccagaggcgtgccggccagcggcggggggcgcagtgcacacgagggggctggacttcgcctgtgatatctacatctgggcgcccttggccgggacttgtggggtccttctcctgtcactggttatcaccctttactgccggagggaccagaggctgccccccgatgcccacaagccccctgggggaggcagtttccggacccccatccaagaggagcaggccgacgcccactccaccctggccaagatcagagtgaagttcagcaggagcgcagacgcccccgcgtaccagcagggccagaaccagctctataacgagctcaatctaggacgaagagaggagtacgatgttttggacaagagacgtggccgggaccctgagatggggggaaagccgagaaggaagaaccctcaggaaggcctgtacaatgaactgcagaaagataagatggcggaggcctacagtgagattgggatgaaaggcgagcgccggaggggcaaggggcacgatggcctttaccagggtctcagtacagccaccaaggacacctacgacgcccttcacatgcaggccctgccccctcgcggctctggcgagggaaggggttccctgcttacttgcggcgacgtcgaagagaatcccggtccgatggccctcccagtaactgccctccttttgcccctcgcactccttcttcatgccgctcgccccaactgggtcaacgtgattagcgatttgaagaaaatcgaggaccttatacagtctatgcatattgacgctacactgtatactgagagtgatgtacacccgtcctgtaaggtaacggccatgaaatgctttcttctggagctccaggtcatcagcttggagtctggggacgcaagcatccacgatacggttgaaaacctcatcatccttgcgaacaactctctctcatctaatggaaacgttacagagagtgggtgtaaggagtgcgaagagttggaagaaaaaaacatcaaagaatttcttcaatccttcgttcacatagtgcaaatgttcattaacacgtccactaccacacccgccccgaggccacctacgccggcaccgactatcgccagtcaacccctctctctgcgccccgaggcttgccggcctgcggctggtggggcggtccacacccggggcctggattttgcgtgcgatatatacatctgggcacctcttgccggcacctgcggagtgctgcttctctcactcgttattacgctgtactgctaa

SEQ ID NO: 214 - DNA, 2115 bp, synthetic construct
  source 1..2115: mol_type = other DNA
atggccttaccagtgaccgccttgctcctgccgctggccttgctgctccacgccgccaggccgcaggtgcagctggtgcagtctggggctgaggtgaagaagcctggggcctcagtgaaggtttcctgcaaggcatctggatacaccttcaccagctactatatgcactgggtgcgacaggcccctggacaagggcttgagtggatgggatggatcaacccgaacagtggtggcacaaaatacgcacataagttccagggcagagtcaccatgaccagggacacgtccacgagcacagtctacatggagctgagcagcctgagatctgaggacacggccgtgtattactgtgctagaggactgtcaggttacgattttgactactggggccaagggaccacagtcaccgtctcctcaggtggaggcggttcaggcggaggtggctctggcggtggcggatcggacatccagatgacccagtctccatcctccctgtctgcatctgtaggagacagagtcaccatcacttgccaggcgagtcaggacattagcaactatttaaattggtatcagcagaaaccagggaaagcccctaagctcctgatctacgatgcatccaatttggaaacaggggtcccatcaaggttcagtggaagtggatctgggacagattttactttgaccatcagcagcctgcagcctgaagattttgcaacatattactgtcaacaggcttataggtggcctatcaccttcggccaagggacacgactggagattaaaaccacgacgccagcgccgcggccaccaacaccggcgcccaccatcgcgtcgcagcccctgtccctgcgcccagaggcgtgccggccagcggcggggggcgcagtgcacacgagggggctggacttcgcctgtgatatctacatctgggcgcccttggccgggacttgtggggtccttctcctgtcactggttatcaccctttactgccggagggaccagaggctgccccccgatgcccacaagccccctgggggaggcagtttccggacccccatccaagaggagcaggccgacgcccactccaccctggccaagatcagagtgaagttcagcaggagcgcagacgcccccgcgtaccagcagggccagaaccagctctataacgagctcaatctaggacgaagagaggagtacgatgttttggacaagagacgtggccgggaccctgagatggggggaaagccgagaaggaagaaccctcaggaaggcctgtacaatgaactgcagaaagataagatggcggaggcctacagtgagattgggatgaaaggcgagcgccggaggggcaaggggcacgatggcctttaccagggtctcagtacagccaccaaggacacctacgacgcccttcacatgcaggccctgccccctcgcggctctggcgagggaaggggttccctgcttacttgcggcgacgtcgaagagaatcccggtccgatggccctcccagtaactgccctccttttgcccctcgcactccttcttcatgccgctcgccccaactgggtcaacgtgattagcgatttgaagaaaatcgaggaccttatacagtctatgcatattgacgctacactgtatactgagagtgatgtacacccgtcctgtaaggtaacggccatgaaatgctttcttctggagctccaggtcatcagcttggagtctggggacgcaagcatccacgatacggttgaaaacctcatcatccttgcgaacaactctctctcatctaatggaaacgttacagagagtgggtgtaaggagtgcgaagagttggaagaaaaaaacatcaaagaatttcttcaatccttcgttcacatagtgcaaatgttcattaacacgtccactaccacacccgccccgaggccacctacgccggcaccgactatcgccagtcaacccctctctctgcgccccgaggcttgccggcctgcggctggtggggcggtccacacccggggcctggattttgcgtgcgatatatacatctgggcacctcttgccggcacctgcggagtgctgcttctctcactcgttattacgctgtactgctaa

SEQ ID NO: 215 - DNA, 2118 bp, synthetic construct
  source 1..2118: mol_type = other DNA
atggccttaccagtgaccgccttgctcctgccgctggccttgctgctccacgccgccaggccgcaggtgcagctggtgcagtctggggctgaggtgaagaagcctggggcctcagtgaaggtttcctgcaaggcatctggatacaccttcaccggctactatatgcactgggtgcgacaggcccctggacaagggcttgagtggatgggatggatgaaccctaatagtggtaacacaggctacgcacagaagttccagggcagagtcaccatgaccagggacacgtccacgagcacagtctacatggagctgagcagcctgagatctgaggacacggccgtgtattactgtgctagagggaccgacgtgtatggagactttgactactggggccaagggaccctggtcaccgtctcctcaggtggaggcggttcaggcggaggtggctctggcggtggcggatcggacatccagatgacccagtctccatcctccctgtctgcatctgtaggagacagagtcaccatcacttgccgggcaagtcagagcattagcagctatttaaattggtatcagcagaaaccagggaaagcccctaagctcctgatctatgatgcatcctacttggaaacaggggtcccatcaaggttcagtggcagtggatctgggacagatttcactctcaccatcagcagtctgcaacctgaagattttgcaacttactactgtcaacagagttacacaattcctcctacgttcggccaagggaccaaggtggaaatcaaaaccacgacgccagcgccgcggccaccaacaccggcgcccaccatcgcgtcgcagcccctgtccctgcgcccagaggcgtgccggccagcggcggggggcgcagtgcacacgagggggctggacttcgcctgtgatatctacatctgggcgcccttggccgggacttgtggggtccttctcctgtcactggttatcaccctttactgccggagggaccagaggctgccccccgatgcccacaagccccctgggggaggcagtttccggacccccatccaagaggagcaggccgacgcccactccaccctggccaagatcagagtgaagttcagcaggagcgcagacgcccccgcgtaccagcagggccagaaccagctctataacgagctcaatctaggacgaagagaggagtacgatgttttggacaagagacgtggccgggaccctgagatggggggaaagccgagaaggaagaaccctcaggaaggcctgtacaatgaactgcagaaagataagatggcggaggcctacagtgagattgggatgaaaggcgagcgccggaggggcaaggggcacgatggcctttaccagggtctcagtacagccaccaaggacacctacgacgcccttcacatgcaggccctgccccctcgcggctctggcgagggaaggggttccctgcttacttgcggcgacgtcgaagagaatcccggtccgatggccctcccagtaactgccctccttttgcccctcgcactccttcttcatgccgctcgccccaactgggtcaacgtgattagcgatttgaagaaaatcgaggaccttatacagtctatgcatattgacgctacactgtatactgagagtgatgtacacccgtcctgtaaggtaacggccatgaaatgctttcttctggagctccaggtcatcagcttggagtctggggacgcaagcatccacgatacggttgaaaacctcatcatccttgcgaacaactctctctcatctaatggaaacgttacagagagtgggtgtaaggagtgcgaagagttggaagaaaaaaacatcaaagaatttcttcaatccttcgttcacatagtgcaaatgttcattaacacgtccactaccacacccgccccgaggccacctacgccggcaccgactatcgccagtcaacccctctctctgcgccccgaggcttgccggcctgcggctggtggggcggtccacacccggggcctggattttgcgtgcgatatatacatctgggcacctcttgccggcacctgcggagtgctgcttctctcactcgttattacgctgtactgctaa

SEQ ID NO: 216 - DNA, 2139 bp, synthetic construct
  source 1..2139: mol_type = other DNA
atggccttaccagtgaccgccttgctcctgccgctggccttgctgctccacgccgccaggccgcaggtgcagctggtgcagtctggggctgaggtgaagaagcctgggtcctcggtgaaggtctcctgcaaggcttctggatacaccttcacagagaacgaaatgcattgggtgcgacaggcccctggacaagggcttgagtggatgggaggcatcatccctatctttggtacagcaaactacgcacagaagttccagggcagagtcacgattaccgcggacgaatccacgagcacagcctacatggagctgagcagcctgagatctgaggacacggccgtgtattactgtgcgagagagggaggaaccgccatggccaccggttattactactatgggatggacgtgtggggccaagggaccaccgtcaccgtctcctcaggtggaggcggttcaggcggaggtggctctggcggtggcggatcggacatccagatgacccagtctccatcctccctgtctgcatctgtaggagacagagtcaccatcacttgccaggcgagtcaggacattagcaactatttaaattggtatcagcagaaaccagggaaagcccctaagctcctgatctacgatgcatccaatttggaaacaggggtcccatcaaggttcagtggaagtggatctgggacagattttactctcaccatcagcagcctgcagcctgaagattttgcaacatattactgtcaacagagctattccacccctctcactttcggccaggggaccaaggtggagatcaaaaccacgacgccagcgccgcggccaccaacaccggcgcccaccatcgcgtcgcagcccctgtccctgcgcccagaggcgtgccggccagcggcggggggcgcagtgcacacgagggggctggacttcgcctgtgatatctacatctgggcgcccttggccgggacttgtggggtccttctcctgtcactggttatcaccctttactgccggagggaccagaggctgccccccgatgcccacaagccccctgggggaggcagtttccggacccccatccaagaggagcaggccgacgcccactccaccctggccaagatcagagtgaagttcagcaggagcgcagacgcccccgcgtaccagcagggccagaaccagctctataacgagctcaatctaggacgaagagaggagtacgatgttttggacaagagacgtggccgggaccctgagatggggggaaagccgagaaggaagaaccctcaggaaggcctgtacaatgaactgcagaaagataagatggcggaggcctacagtgagattgggatgaaaggcgagcgccggaggggcaaggggcacgatggcctttaccagggtctcagtacagccaccaaggacacctacgacgcccttcacatgcaggccctgccccctcgcggctctggcgagggaaggggttccctgcttacttgcggcgacgtcgaagagaatcccggtccgatggccctcccagtaactgccctccttttgcccctcgcactccttcttcatgccgctcgccccaactgggtcaacgtgattagcgatttgaagaaaatcgaggaccttatacagtctatgcatattgacgctacactgtatactgagagtgatgtacacccgtcctgtaaggtaacggccatgaaatgctttcttctggagctccaggtcatcagcttggagtctggggacgcaagcatccacgatacggttgaaaacctcatcatccttgcgaacaactctctctcatctaatggaaacgttacagagagtgggtgtaaggagtgcgaagagttggaagaaaaaaacatcaaagaatttcttcaatccttcgttcacatagtgcaaatgttcattaacacgtccactaccacacccgccccgaggccacctacgccggcaccgactatcgccagtcaacccctctctctgcgccccgaggcttgccggcctgcggctggtggggcggtccacacccggggcctggattttgcgtgcgatatatacatctgggcacctcttgccggcacctgcggagtgctgcttctctcactcgttattacgctgtactgctaa

SEQ ID NO: 217 - DNA, 2133 bp, synthetic construct
  source 1..2133: mol_type = other DNA
atggccttaccagtgaccgccttgctcctgccgctggccttgctgctccacgccgccaggccgcaggtgcagctggtgcagtctggggctgaggtgaagaagcctggggcctcagtgaaggtttcctgcaaggcatctggatacaccttcaccgagaatgaaatgcactgggtgcgacaggcccctggacaagggcttgagtggatgggatggatcaactctaatggtggctacacagggtacgcactgaagttccagggcagagtcaccatgaccagggacacgtccacgagcacagtctacatggagctgagcagcctgagatctgaggacacggccgtgtattactgtgctagagccagtaattacggaggacactttgactactggggccaagggaccctggtcaccgtctcctcaggtggaggcggttcaggcggaggtggctctggcggtggcggatcggatattgtgatgactcagtctccactctccctgcccgtcacccctggagagccggcctccatctcctgcaggtctagtcagagcctcctgcattccaacggatacaactatttggattggtacctgcagaagccagggcagtctccacagctcctgatctatcaggcatctagcctggagtccggggtccctgacaggttcagtggcagtggatcaggcacagattttacactgaaaatcagcagagtggaggctgaggatgttggggtttattactgcatgcaaggaacgcactggcctccaactttcggcggagggaccaaggtggagatcaaaaccacgacgccagcgccgcggccaccaacaccggcgcccaccatcgcgtcgcagcccctgtccctgcgcccagaggcgtgccggccagcggcggggggcgcagtgcacacgagggggctggacttcgcctgtgatatctacatctgggcgcccttggccgggacttgtggggtccttctcctgtcactggttatcaccctttactgccggagggaccagaggctgccccccgatgcccacaagccccctgggggaggcagtttccggacccccatccaagaggagcaggccgacgcccactccaccctggccaagatcagagtgaagttcagcaggagcgcagacgcccccgcgtaccagcagggccagaaccagctctataacgagctcaatctaggacgaagagaggagtacgatgttttggacaagagacgtggccgggaccctgagatggggggaaagccgagaaggaagaaccctcaggaaggcctgtacaatgaactgcagaaagataagatggcggaggcctacagtgagattgggatgaaaggcgagcgccggaggggcaaggggcacgatggcctttaccagggtctcagtacagccaccaaggacacctacgacgcccttcacatgcaggccctgccccctcgcggctctggcgagggaaggggttccctgcttacttgcggcgacgtcgaagagaatcccggtccgatggccctcccagtaactgccctccttttgcccctcgcactccttcttcatgccgctcgccccaactgggtcaacgtgattagcgatttgaagaaaatcgaggaccttatacagtctatgcatattgacgctacactgtatactgagagtgatgtacacccgtcctgtaaggtaacggccatgaaatgctttcttctggagctccaggtcatcagcttggagtctggggacgcaagcatccacgatacggttgaaaacctcatcatccttgcgaacaactctctctcatctaatggaaacgttacagagagtgggtgtaaggagtgcgaagagttggaagaaaaaaacatcaaagaatttcttcaatccttcgttcacatagtgcaaatgttcattaacacgtccactaccacacccgccccgaggccacctacgccggcaccgactatcgccagtcaacccctctctctgcgccccgaggcttgccggcctgcggctggtggggcggtccacacccggggcctggattttgcgtgcgatatatacatctgggcacctcttgccggcacctgcggagtgctgcttctctcactcgttattacgctgtactgctaa

SEQ ID NO: 218 - DNA, 2118 bp, synthetic construct
  source 1..2118: mol_type = other DNA
atggccttaccagtgaccgccttgctcctgccgctggccttgctgctccacgccgccaggccgcaggtgcagctggtgcagtctggggctgaggtgaagaagcctggggcctcagtgaaggtttcctgcaaggcatctggatacaccttcaccagctactatatgcactgggtgcgacaggcccctggacaagggcttgagtggatgggaataatcaaccctagtggtggcagcacaatatacgcacagaagttccagggcagagtcaccatgaccagggacacgtccacgagcacagtctacatggagctgagcagcctgagatctgaggacacggccgtgtattactgtgctaaagacatgggagcgtgggcagctggttttgactactggggccaagggaccctggtcaccgtctcctcaggtggaggcggttcaggcggaggtggctctggcggtggcggatcggacatccagatgacccagtctccatcctccctgtctgcatctgtaggagacagagtcaccatcacttgccaagcaagtcaggacattagcaactatttaaattggtatcagcagaaaccagggaaagcccctaagctcctgatctatgctacctccaccttggctaacggggtcccatcaaggttcagtggcagtggatctgggacagatttcactctcaccatcagcagtctgcaacctgaagattttgcaacttactactgtcaacagagttacagtacgcttaccttcggccaagggacacgactggagattaaaaccacgacgccagcgccgcggccaccaacaccggcgcccaccatcgcgtcgcagcccctgtccctgcgcccagaggcgtgccggccagcggcggggggcgcagtgcacacgagggggctggacttcgcctgtgatatctacatctgggcgcccttggccgggacttgtggggtccttctcctgtcactggttatcaccctttactgccggagggaccagaggctgccccccgatgcccacaagccccctgggggaggcagtttccggacccccatccaagaggagcaggccgacgcccactccaccctggccaagatcagagtgaagttcagcaggagcgcagacgcccccgcgtaccagcagggccagaaccagctctataacgagctcaatctaggacgaagagaggagtacgatgttttggacaagagacgtggccgggaccctgagatggggggaaagccgagaaggaagaaccctcaggaaggcctgtacaatgaactgcagaaagataagatggcggaggcctacagtgagattgggatgaaaggcgagcgccggaggggcaaggggcacgatggcctttaccagggtctcagtacagccaccaaggacacctacgacgcccttcacatgcaggccctgccccctcgcggctctggcgagggaaggggttccctgcttacttgcggcgacgtcgaagagaatcccggtccgatggccctcccagtaactgccctccttttgcccctcgcactccttcttcatgccgctcgccccaactgggtcaacgtgattagcgatttgaagaaaatcgaggaccttatacagtctatgcatattgacgctacactgtatactgagagtgatgtacacccgtcctgtaaggtaacggccatgaaatgctttcttctggagctccaggtcatcagcttggagtctggggacgcaagcatccacgatacggttgaaaacctcatcatccttgcgaacaactctctctcatctaatggaaacgttacagagagtgggtgtaaggagtgcgaagagttggaagaaaaaaacatcaaagaatttcttcaatccttcgttcacatagtgcaaatgttcattaacacgtccactaccacacccgccccgaggccacctacgccggcaccgactatcgccagtcaacccctctctctgcgccccgaggcttgccggcctgcggctggtggggcggtccacacccggggcctggattttgcgtgcgatatatacatctgggcacctcttgccggcacctgcggagtgctgcttctctcactcgttattacgctgtactgctaa

SEQ ID NO: 219 - DNA, 2121 bp, synthetic construct
  source 1..2121: mol_type = other DNA
atggccttaccagtgaccgccttgctcctgccgctggccttgctgctccacgccgccaggccgcaggtgcagctggtgcagtctggggctgaggtgaagaagcctggggcctcagtgaaggtttcctgcaaggcatctggatacaccttcaccgggtactatatgcactgggtgcgacaggcccctggacaagggcttgagtggatgggatggatcaacccaaatagtggtgatacagggtacgcacagaagttccagggcagagtcaccatgaccagggacacgtccacgagcacagtctacatggagctgagcagcctgagatctgaggacacggccgtgtattactgtgctagatccgtcaacgactacggtgattacgacggttactggggccaagggaccctggtcaccgtctcctcaggtggaggcggttcaggcggaggtggctctggcggtggcggatcggacatccagatgacccagtctccatcctccctgtctgcatctgtaggagacagagtcaccatcacttgccaggcgagtcaggacattagcaactatttaaattggtatcagcagaaaccagggaaagcccctaagctcctgatctacgatgcatccaatttggaaacaggggtcccatcaaggttcagtggaagtggatctgggacagattttactctgaccatcagcagcctgcagcctgaagattttgcaacatattactgtcaacagtcttacagtacgcctcctacgttcggccaagggaccaaggtggaaatcaaaaccacgacgccagcgccgcggccaccaacaccggcgcccaccatcgcgtcgcagcccctgtccctgcgcccagaggcgtgccggccagcggcggggggcgcagtgcacacgagggggctggacttcgcctgtgatatctacatctgggcgcccttggccgggacttgtggggtccttctcctgtcactggttatcaccctttactgccggagggaccagaggctgccccccgatgcccacaagccccctgggggaggcagtttccggacccccatccaagaggagcaggccgacgcccactccaccctggccaagatcagagtgaagttcagcaggagcgcagacgcccccgcgtaccagcagggccagaaccagctctataacgagctcaatctaggacgaagagaggagtacgatgttttggacaagagacgtggccgggaccctgagatggggggaaagccgagaaggaagaaccctcaggaaggcctgtacaatgaactgcagaaagataagatggcggaggcctacagtgagattgggatgaaaggcgagcgccggaggggcaaggggcacgatggcctttaccagggtctcagtacagccaccaaggacacctacgacgcccttcacatgcaggccctgccccctcgcggctctggcgagggaaggggttccctgcttacttgcggcgacgtcgaagagaatcccggtccgatggccctcccagtaactgccctccttttgcccctcgcactccttcttcatgccgctcgccccaactgggtcaacgtgattagcgatttgaagaaaatcgaggaccttatacagtctatgcatattgacgctacactgtatactgagagtgatgtacacccgtcctgtaaggtaacggccatgaaatgctttcttctggagctccaggtcatcagcttggagtctggggacgcaagcatccacgatacggttgaaaacctcatcatccttgcgaacaactctctctcatctaatggaaacgttacagagagtgggtgtaaggagtgcgaagagttggaagaaaaaaacatcaaagaatttcttcaatccttcgttcacatagtgcaaatgttcattaacacgtccactaccacacccgccccgaggccacctacgccggcaccgactatcgccagtcaacccctctctctgcgccccgaggcttgccggcctgcggctggtggggcggtccacacccggggcctggattttgcgtgcgatatatacatctgggcacctcttgccggcacctgcggagtgctgcttctctcactcgttattacgctgtactgctaa

SEQ ID NO: 220 - DNA, 2121 bp, synthetic construct
  source 1..2121: mol_type = other DNA
atggccttaccagtgaccgccttgctcctgccgctggccttgctgctccacgccgccaggccgcaggtgcagctggtgcagtctggggctgaggtgaagaagcctggggcctcagtgaaggtttcctgcaaggcatctggatacaccttcaccggatactatatgcactgggtgcgacaggcccctggacaagggcttgagtggatgggaataatcaaccctagtggtgggagcacaagctacgcacagaagttccagggcagagtcaccatgaccagggacacgtccacgagcacagtctacatggagctgagcagcctgagatctgaggacacggccgtgtattactgtgctagagattacggtgattatgacgcctcgtttgactactggggccaagggaccctggtcaccgtctcctcaggtggaggcggttcaggcggaggtggctctggcggtggcggatcggacatccagatgacccagtctccatcctccctgtctgcatctgtaggagacagagtcaccatcacttgccgggcaagtcagagcattgacaattggttagcgtggtatcagcagaaaccagggaaagcccctaagctcctgatctatgctgcatccacattgcaaagtggggtcccatcaaggttcagtggcagtggatctgggacagatttcactctcaccatcagcagtctgcaacctgaagattttgcaacttactactgtcaacagagttacgatagtcctcccacttttggccaggggaccaagctggagatcaaaaccacgacgccagcgccgcggccaccaacaccggcgcccaccatcgcgtcgcagcccctgtccctgcgcccagaggcgtgccggccagcggcggggggcgcagtgcacacgagggggctggacttcgcctgtgatatctacatctgggcgcccttggccgggacttgtggggtccttctcctgtcactggttatcaccctttactgccggagggaccagaggctgccccccgatgcccacaagccccctgggggaggcagtttccggacccccatccaagaggagcaggccgacgcccactccaccctggccaagatcagagtgaagttcagcaggagcgcagacgcccccgcgtaccagcagggccagaaccagctctataacgagctcaatctaggacgaagagaggagtacgatgttttggacaagagacgtggccgggaccctgagatggggggaaagccgagaaggaagaaccctcaggaaggcctgtacaatgaactgcagaaagataagatggcggaggcctacagtgagattgggatgaaaggcgagcgccggaggggcaaggggcacgatggcctttaccagggtctcagtacagccaccaaggacacctacgacgcccttcacatgcaggccctgccccctcgcggctctggcgagggaaggggttccctgcttacttgcggcgacgtcgaagagaatcccggtccgatggccctcccagtaactgccctccttttgcccctcgcactccttcttcatgccgctcgccccaactgggtcaacgtgattagcgatttgaagaaaatcgaggaccttatacagtctatgcatattgacgctacactgtatactgagagtgatgtacacccgtcctgtaaggtaacggccatgaaatgctttcttctggagctccaggtcatcagcttggagtctggggacgcaagcatccacgatacggttgaaaacctcatcatccttgcgaacaactctctctcatctaatggaaacgttacagagagtgggtgtaaggagtgcgaagagttggaagaaaaaaacatcaaagaatttcttcaatccttcgttcacatagtgcaaatgttcattaacacgtccactaccacacccgccccgaggccacctacgccggcaccgactatcgccagtcaacccctctctctgcgccccgaggcttgccggcctgcggctggtggggcggtccacacccggggcctggattttgcgtgcgatatatacatctgggcacctcttgccggcacctgcggagtgctgcttctctcactcgttattacgctgtactgctaa

SEQ ID NO: 221 - DNA, 2112 bp, synthetic construct
  source 1..2112: mol_type = other DNA
atggccttaccagtgaccgccttgctcctgccgctggccttgctgctccacgccgccaggccgcaggtgcagctggtgcagtctggggctgaggtgaagaagcctggggcctcagtgaaggtttcctgcaaggcatctggatacaccttcaccagctacgatatcaattgggtgcgacaggcccctggacaagggcttgagtggatgggaataatcaacccctccgatggtagcacaatctacgcacagaacttccagggcagagtcaccatgaccagggacacgtccacgagcacagtctacatggagctgagcagcctgagatctgaggacacggccgtgtattactgtgtgaaggaagaggcctggtacttcgatctctggggccgtggcaccctggtcactgtctcctcaggtggaggcggttcaggcggaggtggctctggcggtggcggatcggacatccagatgacccagtctccatcctccctgtctgcatctgtaggagacagagtcaccatcacttgccaggcgagtcaggacattagcaactatttaaattggtatcagcagaaaccagggaaagcccctaagctcctgatctacgatgcatccaatttggaaacaggggtcccatcaaggttcagtggaagtggatctgggacagattttactttgaccatcagcagcctgcagcctgaagattttgcaacatattactgtcaacagtcctatagcacccctctcactttcggcggagggaccaaggtggagatcaaaaccacgacgccagcgccgcggccaccaacaccggcgcccaccatcgcgtcgcagcccctgtccctgcgcccagaggcgtgccggccagcggcggggggcgcagtgcacacgagggggctggacttcgcctgtgatatctacatctgggcgcccttggccgggacttgtggggtccttctcctgtcactggttatcaccctttactgccggagggaccagaggctgccccccgatgcccacaagccccctgggggaggcagtttccggacccccatccaagaggagcaggccgacgcccactccaccctggccaagatcagagtgaagttcagcaggagcgcagacgcccccgcgtaccagcagggccagaaccagctctataacgagctcaatctaggacgaagagaggagtacgatgttttggacaagagacgtggccgggaccctgagatggggggaaagccgagaaggaagaaccctcaggaaggcctgtacaatgaactgcagaaagataagatggcggaggcctacagtgagattgggatgaaaggcgagcgccggaggggcaaggggcacgatggcctttaccagggtctcagtacagccaccaaggacacctacgacgcccttcacatgcaggccctgccccctcgcggctctggcgagggaaggggttccctgcttacttgcggcgacgtcgaagagaatcccggtccgatggccctcccagtaactgccctccttttgcccctcgcactccttcttcatgccgctcgccccaactgggtcaacgtgattagcgatttgaagaaaatcgaggaccttatacagtctatgcatattgacgctacactgtatactgagagtgatgtacacccgtcctgtaaggtaacggccatgaaatgctttcttctggagctccaggtcatcagcttggagtctggggacgcaagcatccacgatacggttgaaaacctcatcatccttgcgaacaactctctctcatctaatggaaacgttacagagagtgggtgtaaggagtgcgaagagttggaagaaaaaaacatcaaagaatttcttcaatccttcgttcacatagtgcaaatgttcattaacacgtccactaccacacccgccccgaggccacctacgccggcaccgactatcgccagtcaacccctctctctgcgccccgaggcttgccggcctgcggctggtggggcggtccacacccggggcctggattttgcgtgcgatatatacatctgggcacctcttgccggcacctgcggagtgctgcttctctcactcgttattacgctgtactgctaa

SEQ ID NO: 222 - DNA, 2112 bp, synthetic construct
  source 1..2112: mol_type = other DNA
atggccttaccagtgaccgccttgctcctgccgctggccttgctgctccacgccgccaggccgcaggtgcagctggtgcagtctggggctgaggtgaagaagcctggggcctcagtgaaggtttcctgcaaggcatctggatacaccttcaccagctactatatgcactgggtgcgacaggcccctggacaagggcttgagtggatgggatggatgaaccctgataacggtgatacagggtacgcacagatgttccagggcagagtcaccatgaccagggacacgtccacgagcacagtctacatggagctgagcagcctgagatctgaggacacggccgtgtattactgtgcttcaggggattactatgacatcttgtactggggccaagggaccctggtcaccgtctcctcaggtggaggcggttcaggcggaggtggctctggcggtggcggatcggacatccagatgacccagtctccatcctccctgtctgcatctgtaggagacagagtcaccatcacttgccaggcgagtcaggacattagcaactatttaaattggtatcagcagaaaccagggaaagcccctaagctcctgatctacgatgtgtccaatttggaaacaggggtcccatcaaggttcagtggaagtggatctgggacagattttactctcaccatcagcagcctgcagcctgaagattttgcaacatattactgtcaacaggctaattccttccctctcactttcggcggagggaccaaggtggagatcaaaaccacgacgccagcgccgcggccaccaacaccggcgcccaccatcgcgtcgcagcccctgtccctgcgcccagaggcgtgccggccagcggcggggggcgcagtgcacacgagggggctggacttcgcctgtgatatctacatctgggcgcccttggccgggacttgtggggtccttctcctgtcactggttatcaccctttactgccggagggaccagaggctgccccccgatgcccacaagccccctgggggaggcagtttccggacccccatccaagaggagcaggccgacgcccactccaccctggccaagatcagagtgaagttcagcaggagcgcagacgcccccgcgtaccagcagggccagaaccagctctataacgagctcaatctaggacgaagagaggagtacgatgttttggacaagagacgtggccgggaccctgagatggggggaaagccgagaaggaagaaccctcaggaaggcctgtacaatgaactgcagaaagataagatggcggaggcctacagtgagattgggatgaaaggcgagcgccggaggggcaaggggcacgatggcctttaccagggtctcagtacagccaccaaggacacctacgacgcccttcacatgcaggccctgccccctcgcggctctggcgagggaaggggttccctgcttacttgcggcgacgtcgaagagaatcccggtccgatggccctcccagtaactgccctccttttgcccctcgcactccttcttcatgccgctcgccccaactgggtcaacgtgattagcgatttgaagaaaatcgaggaccttatacagtctatgcatattgacgctacactgtatactgagagtgatgtacacccgtcctgtaaggtaacggccatgaaatgctttcttctggagctccaggtcatcagcttggagtctggggacgcaagcatccacgatacggttgaaaacctcatcatccttgcgaacaactctctctcatctaatggaaacgttacagagagtgggtgtaaggagtgcgaagagttggaagaaaaaaacatcaaagaatttcttcaatccttcgttcacatagtgcaaatgttcattaacacgtccactaccacacccgccccgaggccacctacgccggcaccgactatcgccagtcaacccctctctctgcgccccgaggcttgccggcctgcggctggtggggcggtccacacccggggcctggattttgcgtgcgatatatacatctgggcacctcttgccggcacctgcggagtgctgcttctctcactcgttattacgctgtactgctaa

SEQ ID NO: 223 - DNA, 2115 bp, synthetic construct
  source 1..2115: mol_type = other DNA
atggccttaccagtgaccgccttgctcctgccgctggccttgctgctccacgccgccaggccgcaggtgcagctggtgcagtctggggctgaggtgaagaagcctggggcctcagtgaaggtttcctgcaaggcatctggatacaccttcaccagctactatatgcactgggtgcgacaggcccctggacaagggcttgagtggatgggatggatgaaccccaacagtggtgatacaggatacgcacagaagttccagggcagagtcaccatgaccagggacacgtccacgagcacagtctacatggagctgagcagcctgagatctgaggacacggccgtgtattactgtgctagagggcccagcgggtacgaatttgactactggggccaagggaccctggtcaccgtctcctcaggtggaggcggttcaggcggaggtggctctggcggtggcggatcggacatccagatgacccagtctccatcctccctgtctgcatctgtaggagacagagtcaccatcacttgccgggcaagtcagaccattagcaattatttaaattggtatcagcagaaaccagggaaagcccctaagctcctgatctatgacgcatccagtttggaaagtggggtcccatcaaggttcagtggcagtggatctgggacagatttcactctcaccatcagcagtctgcaacctgaagattttgcaacttactactgtcaacaggcaatcagttttcctctcactttcggcggagggaccaaggtggagatcaaaaccacgacgccagcgccgcggccaccaacaccggcgcccaccatcgcgtcgcagcccctgtccctgcgcccagaggcgtgccggccagcggcggggggcgcagtgcacacgagggggctggacttcgcctgtgatatctacatctgggcgcccttggccgggacttgtggggtccttctcctgtcactggttatcaccctttactgccggagggaccagaggctgccccccgatgcccacaagccccctgggggaggcagtttccggacccccatccaagaggagcaggccgacgcccactccaccctggccaagatcagagtgaagttcagcaggagcgcagacgcccccgcgtaccagcagggccagaaccagctctataacgagctcaatctaggacgaagagaggagtacgatgttttggacaagagacgtggccgggaccctgagatggggggaaagccgagaaggaagaaccctcaggaaggcctgtacaatgaactgcagaaagataagatggcggaggcctacagtgagattgggatgaaaggcgagcgccggaggggcaaggggcacgatggcctttaccagggtctcagtacagccaccaaggacacctacgacgcccttcacatgcaggccctgccccctcgcggctctggcgagggaaggggttccctgcttacttgcggcgacgtcgaagagaatcccggtccgatggccctcccagtaactgccctccttttgcccctcgcactccttcttcatgccgctcgccccaactgggtcaacgtgattagcgatttgaagaaaatcgaggaccttatacagtctatgcatattgacgctacactgtatactgagagtgatgtacacccgtcctgtaaggtaacggccatgaaatgctttcttctggagctccaggtcatcagcttggagtctggggacgcaagcatccacgatacggttgaaaacctcatcatccttgcgaacaactctctctcatctaatggaaacgttacagagagtgggtgtaaggagtgcgaagagttggaagaaaaaaacatcaaagaatttcttcaatccttcgttcacatagtgcaaatgttcattaacacgtccactaccacacccgccccgaggccacctacgccggcaccgactatcgccagtcaacccctctctctgcgccccgaggcttgccggcctgcggctggtggggcggtccacacccggggcctggattttgcgtgcgatatatacatctgggcacctcttgccggcacctgcggagtgctgcttctctcactcgttattacgctgtactgctaa

SEQ ID NO: 224 - DNA, 2127 bp, synthetic construct
  source 1..2127: mol_type = other DNA
atggccttaccagtgaccgccttgctcctgccgctggccttgctgctccacgccgccaggccgcaggtgcagctggtgcagtctggggctgaggtgaagaagcctggggcctcagtgaaggtttcctgcaaggcatctggatacaccttcaccgattactatatgcactgggtgcgacaggcccctggacaagggcttgagtggatgggaataatcaaccctaatagtggtggaacaaattacgcacagaagttccagggcagagtcaccatgaccagggacacgtccacgagcacagtctacatggagctgagcagcctgagatctgaggacacggccgtgtattactgtgctagagattttagtgtgtatgctgctgcagatggcatggatgtctggggccaagggacattggtcaccgtctcttcaggtggaggcggttcaggcggaggtggctctggcggtggcggatcggacatccagatgacccagtctccatcctccctgtctgcatctgtaggagacagagtcaccatcacttgccgggcaagtcagagcattagcagctatttaaattggtatcagcagaaaccagggaaagcccctaagctcctgatctatgacgcatccaatttggccaccggggtcccatcaaggttcagtggcagtggatctgggacagatttcactctcaccatcagcagtctgcaacctgaagattttgcaacttactactgtcaacagagtgatagttcacctctcactttcggccaagggaccaaggtggagatcaaaaccacgacgccagcgccgcggccaccaacaccggcgcccaccatcgcgtcgcagcccctgtccctgcgcccagaggcgtgccggccagcggcggggggcgcagtgcacacgagggggctggacttcgcctgtgatatctacatctgggcgcccttggccgggacttgtggggtccttctcctgtcactggttatcaccctttactgccggagggaccagaggctgccccccgatgcccacaagccccctgggggaggcagtttccggacccccatccaagaggagcaggccgacgcccactccaccctggccaagatcagagtgaagttcagcaggagcgcagacgcccccgcgtaccagcagggccagaaccagctctataacgagctcaatctaggacgaagagaggagtacgatgttttggacaagagacgtggccgggaccctgagatggggggaaagccgagaaggaagaaccctcaggaaggcctgtacaatgaactgcagaaagataagatggcggaggcctacagtgagattgggatgaaaggcgagcgccggaggggcaaggggcacgatggcctttaccagggtctcagtacagccaccaaggacacctacgacgcccttcacatgcaggccctgccccctcgcggctctggcgagggaaggggttccctgcttacttgcggcgacgtcgaagagaatcccggtccgatggccctcccagtaactgccctccttttgcccctcgcactccttcttcatgccgctcgccccaactgggtcaacgtgattagcgatttgaagaaaatcgaggaccttatacagtctatgcatattgacgctacactgtatactgagagtgatgtacacccgtcctgtaaggtaacggccatgaaatgctttcttctggagctccaggtcatcagcttggagtctggggacgcaagcatccacgatacggttgaaaacctcatcatccttgcgaacaactctctctcatctaatggaaacgttacagagagtgggtgtaaggagtgcgaagagttggaagaaaaaaacatcaaagaatttcttcaatccttcgttcacatagtgcaaatgttcattaacacgtccactaccacacccgccccgaggccacctacgccggcaccgactatcgccagtcaacccctctctctgcgccccgaggcttgccggcctgcggctggtggggcggtccacacccggggcctggattttgcgtgcgatatatacatctgggcacctcttgccggcacctgcggagtgctgcttctctcactcgttattacgctgtactgctaa

SEQ ID NO: 225 - DNA, 2124 bp, synthetic construct
  source 1..2124: mol_type = other DNA
atggccttaccagtgaccgccttgctcctgccgctggccttgctgctccacgccgccaggccgcaggtgcagctggtgcagtctggggctgaggtgaagaagcctggggcctcagtgaaggtttcctgcaaggcatctggatacaccttcaccgggtactatatgcactgggtgcgacaggcccctggacaagggcttgagtggatgggaataatcaaccctggggatggcggtacaatctacgcacagaatttccagggcagagtcaccatgaccagggacacgtccacgagcacagtctacatggagctgagcagcctgagatctgaggacacggccgtgtattactgtgctagaggattcggcgagtcagcccccgatgcttttgatatctggggccaagggacaatggtcaccgtctcttcaggtggaggcggttcaggcggaggtggctctggcggtggcggatcggacatccagatgacccagtctccatcctccctgtctgcatctgtaggagacagagtcaccatcacttgccaggcaagtcaggacattagcaattatttaaattggtatcagcagaaaccagggaaagcccctaagctcctgatctatggtgcaacgacattgcaaagtggggtcccatcaaggttcagtggcagtggatctgggacagatttcactctcaccatcagcagtctgcaacctgaagattttgcaacttactactgtcaacaggcggatagttttccttacacttttggccaggggaccaagctggagatcaaaaccacgacgccagcgccgcggccaccaacaccggcgcccaccatcgcgtcgcagcccctgtccctgcgcccagaggcgtgccggccagcggcggggggcgcagtgcacacgagggggctggacttcgcctgtgatatctacatctgggcgcccttggccgggacttgtggggtccttctcctgtcactggttatcaccctttactgccggagggaccagaggctgccccccgatgcccacaagccccctgggggaggcagtttccggacccccatccaagaggagcaggccgacgcccactccaccctggccaagatcagagtgaagttcagcaggagcgcagacgcccccgcgtaccagcagggccagaaccagctctataacgagctcaatctaggacgaagagaggagtacgatgttttggacaagagacgtggccgggaccctgagatggggggaaagccgagaaggaagaaccctcaggaaggcctgtacaatgaactgcagaaagataagatggcggaggcctacagtgagattgggatgaaaggcgagcgccggaggggcaaggggcacgatggcctttaccagggtctcagtacagccaccaaggacacctacgacgcccttcacatgcaggccctgccccctcgcggctctggcgagggaaggggttccctgcttacttgcggcgacgtcgaagagaatcccggtccgatggccctcccagtaactgccctccttttgcccctcgcactccttcttcatgccgctcgccccaactgggtcaacgtgattagcgatttgaagaaaatcgaggaccttatacagtctatgcatattgacgctacactgtatactgagagtgatgtacacccgtcctgtaaggtaacggccatgaaatgctttcttctggagctccaggtcatcagcttggagtctggggacgcaagcatccacgatacggttgaaaacctcatcatccttgcgaacaactctctctcatctaatggaaacgttacagagagtgggtgtaaggagtgcgaagagttggaagaaaaaaacatcaaagaatttcttcaatccttcgttcacatagtgcaaatgttcattaacacgtccactaccacacccgccccgaggccacctacgccggcaccgactatcgccagtcaacccctctctctgcgccccgaggcttgccggcctgcggctggtggggcggtccacacccggggcctggattttgcgtgcgatatatacatctgggcacctcttgccggcacctgcggagtgctgcttctctcactcgttattacgctgtactgctaa

SEQ ID NO: 226 - DNA, 2115 bp, synthetic construct
  source 1..2115: mol_type = other DNA
atggccttaccagtgaccgccttgctcctgccgctggccttgctgctccacgccgccaggccgcaggtgcagctggtgcagtctggggctgaggtgaagaagcctggggcctcagtgaaggtttcctgcaaggcatctggatacaccttcaccggttactatatgcactgggtgcgacaggcccctggacaagggcttgagtggatgggaataatcaaccctagtggtgggagcacaagctacgcacagaagttccagggcagagtcaccatgaccagggacacgtccacgagcacagtctacatggagctgagcagcctgagatctgaggacacggccgtgtattactgtgctgccgggacagagatctactacatggacgtctggggcaaagggaccacggtcaccgtctcctcaggtggaggcggttcaggcggaggtggctctggcggtggcggatcggacatccagatgacccagtctccatcctccctgtctgcatctgtaggagacagagtcaccatcacttgcagggcgagtcagactattgacatctatttaaattggtatcagcagaaaccagggaaagcccctaagctcctgatctacgatgcatccaatttggaaacaggggtcccatcaaggttcagtggaagtggatctgggacagattttactttgaccatcagcagcctgcagcctgaagattttgcaacatattactgtcaacaggcagattccttccctctcactttcggcggagggaccaaggtggagatcaaaaccacgacgccagcgccgcggccaccaacaccggcgcccaccatcgcgtcgcagcccctgtccctgcgcccagaggcgtgccggccagcggcggggggcgcagtgcacacgagggggctggacttcgcctgtgatatctacatctgggcgcccttggccgggacttgtggggtccttctcctgtcactggttatcaccctttactgccggagggaccagaggctgccccccgatgcccacaagccccctgggggaggcagtttccggacccccatccaagaggagcaggccgacgcccactccaccctggccaagatcagagtgaagttcagcaggagcgcagacgcccccgcgtaccagcagggccagaaccagctctataacgagctcaatctaggacgaagagaggagtacgatgttttggacaagagacgtggccgggaccctgagatggggggaaagccgagaaggaagaaccctcaggaaggcctgtacaatgaactgcagaaagataagatggcggaggcctacagtgagattgggatgaaaggcgagcgccggaggggcaaggggcacgatggcctttaccagggtctcagtacagccaccaaggacacctacgacgcccttcacatgcaggccctgccccctcgcggctctggcgagggaaggggttccctgcttacttgcggcgacgtcgaagagaatcccggtccgatggccctcccagtaactgccctccttttgcccctcgcactccttcttcatgccgctcgccccaactgggtcaacgtgattagcgatttgaagaaaatcgaggaccttatacagtctatgcatattgacgctacactgtatactgagagtgatgtacacccgtcctgtaaggtaacggccatgaaatgctttcttctggagctccaggtcatcagcttggagtctggggacgcaagcatccacgatacggttgaaaacctcatcatccttgcgaacaactctctctcatctaatggaaacgttacagagagtgggtgtaaggagtgcgaagagttggaagaaaaaaacatcaaagaatttcttcaatccttcgttcacatagtgcaaatgttcattaacacgtccactaccacacccgccccgaggccacctacgccggcaccgactatcgccagtcaacccctctctctgcgccccgaggcttgccggcctgcggctggtggggcggtccacacccggggcctggattttgcgtgcgatatatacatctgggcacctcttgccggcacctgcggagtgctgcttctctcactcgttattacgctgtactgctaa

SEQ ID NO: 227 - DNA, 2142 bp, synthetic construct
  source 1..2142: mol_type = other DNA
atggccttaccagtgaccgccttgctcctgccgctggccttgctgctccacgccgccaggccgcaagtgcagttagttcagtcaggcgccgaagttaaaaaacccggagcgagcgtaaaagtgtcttgtaaagccagtggcggcacatttagctcttatgcgatatcatgggttcgccaagcaccaggccagggcctggaatggatggggatgataaatccaagtgatggcgccactacttacgcacagaagttccagggcagagtcaccatgaccagggacacgtccacgagcacagtctacatggagctgagcagcctgagatctgaggacacggccgtgtattactgtgctagagagagggagctactacatttcgccacaaattattactactatggtatggacgtgtggggccaagggaccaccgtcaccgtctcctcaggtggaggcggttcaggcggaggtggctctggcggtggcggatcggacatccagatgacccagtctccatcttctctgtctgcatctgtaggagacagagtcaccatcacttgtcgggcgagtcagggtattagcaacaacttaaattggtatcagcagaaaccagggaaagcccctaagctcctgatctatgctgcatccagtttgcacagtggggtcccatcaaggttcagcggcagtggatctgggacagatttcactctcactatcagcagcctgcagcctgaagattttgcaacttactattgtcaacaggctgatgctttccctctcactttcggcggagggaccaaggtggagatcaaaaccacgacgccagcgccgcggccaccaacaccggcgcccaccatcgcgtcgcagcccctgtccctgcgcccagaggcgtgccggccagcggcggggggcgcagtgcacacgagggggctggacttcgcctgtgatatctacatctgggcgcccttggccgggacttgtggggtccttctcctgtcactggttatcaccctttactgccggagggaccagaggctgccccccgatgcccacaagccccctgggggaggcagtttccggacccccatccaagaggagcaggccgacgcccactccaccctggccaagatcagagtgaagttcagcaggagcgcagacgcccccgcgtaccagcagggccagaaccagctctataacgagctcaatctaggacgaagagaggagtacgatgttttggacaagagacgtggccgggaccctgagatggggggaaagccgagaaggaagaaccctcaggaaggcctgtacaatgaactgcagaaagataagatggcggaggcctacagtgagattgggatgaaaggcgagcgccggaggggcaaggggcacgatggcctttaccagggtctcagtacagccaccaaggacacctacgacgcccttcacatgcaggccctgccccctcgcggctctggcgagggaaggggttccctgcttacttgcggcgacgtcgaagagaatcccggtccgatggccctcccagtaactgccctccttttgcccctcgcactccttcttcatgccgctcgccccaactgggtcaacgtgattagcgatttgaagaaaatcgaggaccttatacagtctatgcatattgacgctacactgtatactgagagtgatgtacacccgtcctgtaaggtaacggccatgaaatgctttcttctggagctccaggtcatcagcttggagtctggggacgcaagcatccacgatacggttgaaaacctcatcatccttgcgaacaactctctctcatctaatggaaacgttacagagagtgggtgtaaggagtgcgaagagttggaagaaaaaaacatcaaagaatttcttcaatccttcgttcacatagtgcaaatgttcattaacacgtccactaccacacccgccccgaggccacctacgccggcaccgactatcgccagtcaacccctctctctgcgccccgaggcttgccggcctgcggctggtggggcggtccacacccggggcctggattttgcgtgcgatatatacatctgggcacctcttgccggcacctgcggagtgctgcttctctcactcgttattacgctgtactgctaa

SEQ ID NO: 228 - DNA, 2130 bp, synthetic construct
  source 1..2130: mol_type = other DNA
atggccttaccagtgaccgccttgctcctgccgctggccttgctgctccacgccgccaggccgcaggtgcagctggtgcagtctggggctgaggtgaagaagcctggggcctcagtgaaggtttcctgcaaggcatctggatacaccttcacccggaactatatgcactgggtgcgacaggcccctggacaagggcttgagtggatgggatggatctctcctgacaatggtgttacaaattacgcacagaatttccagggcagagtcaccatgaccagggacacgtccacgagcacagtctacatggagctgagcagcctgagatctgaggacacggccgtgtattactgtgctaagacacaaggctcatccagctggtatcagtggtacttcgatctctggggccgtggcaccctggtcactgtctcctcaggtggaggcggttcaggcggaggtggctctggcggtggcggatcggacatccagatgacccagtctccatcctccctgtctgcatctgtaggagacagagtcaccatcacttgccgggcaagtcagagcattggaacctggttagcctggtatcagcagaaaccagggaaagcccctaagctcctgatctatgctgcatccagtttgcaaagtggggtcccatcaaggttcagtggcagtggatctgggacagatttcactctcaccatcagcagtctgcaacctgaagattttgcaacttactactgtcaacagagttacaccacccctattacgttcggccaagggaccaaggtggaaatcaaaaccacgacgccagcgccgcggccaccaacaccggcgcccaccatcgcgtcgcagcccctgtccctgcgcccagaggcgtgccggccagcggcggggggcgcagtgcacacgagggggctggacttcgcctgtgatatctacatctgggcgcccttggccgggacttgtggggtccttctcctgtcactggttatcaccctttactgccggagggaccagaggctgccccccgatgcccacaagccccctgggggaggcagtttccggacccccatccaagaggagcaggccgacgcccactccaccctggccaagatcagagtgaagttcagcaggagcgcagacgcccccgcgtaccagcagggccagaaccagctctataacgagctcaatctaggacgaagagaggagtacgatgttttggacaagagacgtggccgggaccctgagatggggggaaagccgagaaggaagaaccctcaggaaggcctgtacaatgaactgcagaaagataagatggcggaggcctacagtgagattgggatgaaaggcgagcgccggaggggcaaggggcacgatggcctttaccagggtctcagtacagccaccaaggacacctacgacgcccttcacatgcaggccctgccccctcgcggctctggcgagggaaggggttccctgcttacttgcggcgacgtcgaagagaatcccggtccgatggccctcccagtaactgccctccttttgcccctcgcactccttcttcatgccgctcgccccaactgggtcaacgtgattagcgatttgaagaaaatcgaggaccttatacagtctatgcatattgacgctacactgtatactgagagtgatgtacacccgtcctgtaaggtaacggccatgaaatgctttcttctggagctccaggtcatcagcttggagtctggggacgcaagcatccacgatacggttgaaaacctcatcatccttgcgaacaactctctctcatctaatggaaacgttacagagagtgggtgtaaggagtgcgaagagttggaagaaaaaaacatcaaagaatttcttcaatccttcgttcacatagtgcaaatgttcattaacacgtccactaccacacccgccccgaggccacctacgccggcaccgactatcgccagtcaacccctctctctgcgccccgaggcttgccggcctgcggctggtggggcggtccacacccggggcctggattttgcgtgcgatatatacatctgggcacctcttgccggcacctgcggagtgctgcttctctcactcgttattacgctgtactgctaa

SEQ ID NO: 229 - DNA, 2118 bp, synthetic construct
  source 1..2118: mol_type = other DNA
atggccttaccagtgaccgccttgctcctgccgctggccttgctgctccacgccgccaggccgcaggtgcagctggtgcagtctggggctgaggtgaagaagcctggggcctcagtgaaggtttcctgcaaggcatctggatacaccttcaccagctactatatgcactgggtgcgacaggcccctggacaagggcttgagtggatgggaataatcgatccagggagtggtgacacaagctacgcacagaagttccagggcagagtcaccatgaccagggacacgtccacgagcacagtctacatggagctgagcagcctgagatctgaggacacggccgtgtattactgtgctagagggtccaactggtacgactactttgactactggggccaagggaccctggtcaccgtctcctcaggtggaggcggttcaggcggaggtggctctggcggtggcggatcggaaatagtgatgacgcagtctccagccaccctgtctgtgtctccaggggaaagagccaccctctcctgcagggccagtcagagtgttagcagctacttagcctggtaccagcagaaacctggccaggctcccaggctcctcatctatggtgcatccaccagggccactggtatcccagccaggttcagtggcagtgggtctgggacagagttcactctcaccatcagcagcctgcagtctgaagattttgcagtttattactgtcagcagtatgatagctatcctccaactttcggcggagggaccaaggtggagatcaaaaccacgacgccagcgccgcggccaccaacaccggcgcccaccatcgcgtcgcagcccctgtccctgcgcccagaggcgtgccggccagcggcggggggcgcagtgcacacgagggggctggacttcgcctgtgatatctacatctgggcgcccttggccgggacttgtggggtccttctcctgtcactggttatcaccctttactgccggagggaccagaggctgccccccgatgcccacaagccccctgggggaggcagtttccggacccccatccaagaggagcaggccgacgcccactccaccctggccaagatcagagtgaagttcagcaggagcgcagacgcccccgcgtaccagcagggccagaaccagctctataacgagctcaatctaggacgaagagaggagtacgatgttttggacaagagacgtggccgggaccctgagatggggggaaagccgagaaggaagaaccctcaggaaggcctgtacaatgaactgcagaaagataagatggcggaggcctacagtgagattgggatgaaaggcgagcgccggaggggcaaggggcacgatggcctttaccagggtctcagtacagccaccaaggacacctacgacgcccttcacatgcaggccctgccccctcgcggctctggcgagggaaggggttccctgcttacttgcggcgacgtcgaagagaatcccggtccgatggccctcccagtaactgccctccttttgcccctcgcactccttcttcatgccgctcgccccaactgggtcaacgtgattagcgatttgaagaaaatcgaggaccttatacagtctatgcatattgacgctacactgtatactgagagtgatgtacacccgtcctgtaaggtaacggccatgaaatgctttcttctggagctccaggtcatcagcttggagtctggggacgcaagcatccacgatacggttgaaaacctcatcatccttgcgaacaactctctctcatctaatggaaacgttacagagagtgggtgtaaggagtgcgaagagttggaagaaaaaaacatcaaagaatttcttcaatccttcgttcacatagtgcaaatgttcattaacacgtccactaccacacccgccccgaggccacctacgccggcaccgactatcgccagtcaacccctctctctgcgccccgaggcttgccggcctgcggctggtggggcggtccacacccggggcctggattttgcgtgcgatatatacatctgggcacctcttgccggcacctgcggagtgctgcttctctcactcgttattacgctgtactgctaa

SEQ ID NO: 230 - DNA, 2118 bp, synthetic construct
  source 1..2118: mol_type = other DNA
atggccttaccagtgaccgccttgctcctgccgctggccttgctgctccacgccgccaggccgcaggtgcagctggtgcagtctggggctgaggtgaagaagcctggggcctcagtgaaggtttcctgcaaggcatctggataccgcctgagcgaccattatatgcactgggtgcgacaggcccctggacaagggcttgagtggatgggaataatcaaccctagtggtgggagcacaacatacgcacagaacttccagggcagagtcaccatgaccagggacacgtccacgagcacagtctacatggagctgagcagcctgagatctgaggacacggccgtgtattactgtgcttccagttactatggtgactacgtcttggtgaattggggccaagggaccctggtcaccgtctcctcaggtggaggcggttcaggcggaggtggctctggcggtggcggatcggacatccagatgacccagtctccatcctccctgtctgcatctgtaggagacagagtcaccatcacttgccaggcaagtcaggacattagcaattatttaaattggtatcagcagaaaccagggaaagcccctaagctcctgatctatgctgcatccaccttggaaagtggggtcccatcaaggttcagtggcagtggatctgggacagatttcactctcaccatcagcagtctgcaacctgaagattttgcaacttactactgtcttcaggattacgactaccctctgacttttggccaggggaccaagctggagatcaaaaccacgacgccagcgccgcggccaccaacaccggcgcccaccatcgcgtcgcagcccctgtccctgcgcccagaggcgtgccggccagcggcggggggcgcagtgcacacgagggggctggacttcgcctgtgatatctacatctgggcgcccttggccgggacttgtggggtccttctcctgtcactggttatcaccctttactgccggagggaccagaggctgccccccgatgcccacaagccccctgggggaggcagtttccggacccccatccaagaggagcaggccgacgcccactccaccctggccaagatcagagtgaagttcagcaggagcgcagacgcccccgcgtaccagcagggccagaaccagctctataacgagctcaatctaggacgaagagaggagtacgatgttttggacaagagacgtggccgggaccctgagatggggggaaagccgagaaggaagaaccctcaggaaggcctgtacaatgaactgcagaaagataagatggcggaggcctacagtgagattgggatgaaaggcgagcgccggaggggcaaggggcacgatggcctttaccagggtctcagtacagccaccaaggacacctacgacgcccttcacatgcaggccctgccccctcgcggctctggcgagggaaggggttccctgcttacttgcggcgacgtcgaagagaatcccggtccgatggccctcccagtaactgccctccttttgcccctcgcactccttcttcatgccgctcgccccaactgggtcaacgtgattagcgatttgaagaaaatcgaggaccttatacagtctatgcatattgacgctacactgtatactgagagtgatgtacacccgtcctgtaaggtaacggccatgaaatgctttcttctggagctccaggtcatcagcttggagtctggggacgcaagcatccacgatacggttgaaaacctcatcatccttgcgaacaactctctctcatctaatggaaacgttacagagagtgggtgtaaggagtgcgaagagttggaagaaaaaaacatcaaagaatttcttcaatccttcgttcacatagtgcaaatgttcattaacacgtccactaccacacccgccccgaggccacctacgccggcaccgactatcgccagtcaacccctctctctgcgccccgaggcttgccggcctgcggctggtggggcggtccacacccggggcctggattttgcgtgcgatatatacatctgggcacctcttgccggcacctgcggagtgctgcttctctcactcgttattacgctgtactgctaa

SEQ ID NO: 231 - DNA, 2121 bp, synthetic construct
  source 1..2121: mol_type = other DNA
atggccttaccagtgaccgccttgctcctgccgctggccttgctgctccacgccgccaggccgcaggtgcagctggtgcagtctggggctgaggtgaagaagcctggggcctcagtgaaggtttcctgcaaggcatctggatacaccttcaccgattactatgtccactgggtgcgacaggcccctggacaagggcttgagtggatgggatggatcaacccgaatactggtgggacaagcttcgcacagaatttccagggcagagtcaccatgaccagggacacgtccacgagcacagtctacatggagctgagcagcctgagatctgaggacacggccgtgtattactgtgctagagatctgggtcaatggttgggagagattgactactggggccaagggaccctggtcaccgtctcctcaggtggaggcggttcaggcggaggtggctctggcggtggcggatcggacatccagatgacccagtctccatcttctctctctgcatctgtaggagacagagtcaccatcacttgtcgggcgagtcagacaatttataagtggttagcctggtatcagcagaaaccagggaaagcccctaagctcctgatctatgacgcatccagtttggaaagtggggtcccatcaaggttcagcggcagtggatctgggacagatttcactctcactatcagcagcctgcagcctgaagattttgcaacttactattgtcaacaggctaacagtttccctttcactttcggccctgggaccaaagtggatatcaaaaccacgacgccagcgccgcggccaccaacaccggcgcccaccatcgcgtcgcagcccctgtccctgcgcccagaggcgtgccggccagcggcggggggcgcagtgcacacgagggggctggacttcgcctgtgatatctacatctgggcgcccttggccgggacttgtggggtccttctcctgtcactggttatcaccctttactgccggagggaccagaggctgccccccgatgcccacaagccccctgggggaggcagtttccggacccccatccaagaggagcaggccgacgcccactccaccctggccaagatcagagtgaagttcagcaggagcgcagacgcccccgcgtaccagcagggccagaaccagctctataacgagctcaatctaggacgaagagaggagtacgatgttttggacaagagacgtggccgggaccctgagatggggggaaagccgagaaggaagaaccctcaggaaggcctgtacaatgaactgcagaaagataagatggcggaggcctacagtgagattgggatgaaaggcgagcgccggaggggcaaggggcacgatggcctttaccagggtctcagtacagccaccaaggacacctacgacgcccttcacatgcaggccctgccccctcgcggctctggcgagggaaggggttccctgcttacttgcggcgacgtcgaagagaatcccggtccgatggccctcccagtaactgccctccttttgcccctcgcactccttcttcatgccgctcgccccaactgggtcaacgtgattagcgatttgaagaaaatcgaggaccttatacagtctatgcatattgacgctacactgtatactgagagtgatgtacacccgtcctgtaaggtaacggccatgaaatgctttcttctggagctccaggtcatcagcttggagtctggggacgcaagcatccacgatacggttgaaaacctcatcatccttgcgaacaactctctctcatctaatggaaacgttacagagagtgggtgtaaggagtgcgaagagttggaagaaaaaaacatcaaagaatttcttcaatccttcgttcacatagtgcaaatgttcattaacacgtccactaccacacccgccccgaggccacctacgccggcaccgactatcgccagtcaacccctctctctgcgccccgaggcttgccggcctgcggctggtggggcggtccacacccggggcctggattttgcgtgcgatatatacatctgggcacctcttgccggcacctgcggagtgctgcttctctcactcgttattacgctgtactgctaa

SEQ ID NO: 232 - DNA, 2133 bp, synthetic construct
  source 1..2133: mol_type = other DNA
atggccttaccagtgaccgccttgctcctgccgctggccttgctgctccacgccgccaggccgcaggtgcagctggtgcagtctggggctgaggtgaagaagcctggggcctcagtgaaggtttcctgcaaggcatctggatacaccttcaccgactacaccgattactttgtgcactgggtgcgacaggcccctggacaagggcttgagtggatgggaatattcaaccctagtgatggtagcacaagctacgcacaggaattccagggcagagtcaccatgaccagggacacgtccacgagcacagtctacatggagctgagcagcctgagatctgaggacacggccgtgtattactgtgctagaggaccttacagtagtagctggtattactttgactactggggccaagggaccctggtcaccgtctcctcaggtggaggcggttcaggcggaggtggctctggcggtggcggatcggacatccagatgacccagtctccatcctccctgtctgcatctgtaggagacagagtcaccatcacttgccaggcgagtcaggacattagcaactatttaaattggtatcagcagaaaccagggaaagcccctaagctcctgatctacgatgcatccaatttggaaacaggggtcccatcaaggttcagtggaagtggatctgggacagattttactctgaccatcagcagcctgcagcctgaagatttcgcaacatattactgtcaacaggcccactcgtttcctcccacgttcggccaagggaccaaggtggaaatcaaaaccacgacgccagcgccgcggccaccaacaccggcgcccaccatcgcgtcgcagcccctgtccctgcgcccagaggcgtgccggccagcggcggggggcgcagtgcacacgagggggctggacttcgcctgtgatatctacatctgggcgcccttggccgggacttgtggggtccttctcctgtcactggttatcaccctttactgccggagggaccagaggctgccccccgatgcccacaagccccctgggggaggcagtttccggacccccatccaagaggagcaggccgacgcccactccaccctggccaagatcagagtgaagttcagcaggagcgcagacgcccccgcgtaccagcagggccagaaccagctctataacgagctcaatctaggacgaagagaggagtacgatgttttggacaagagacgtggccgggaccctgagatggggggaaagccgagaaggaagaaccctcaggaaggcctgtacaatgaactgcagaaagataagatggcggaggcctacagtgagattgggatgaaaggcgagcgccggaggggcaaggggcacgatggcctttaccagggtctcagtacagccaccaaggacacctacgacgcccttcacatgcaggccctgccccctcgcggctctggcgagggaaggggttccctgcttacttgcggcgacgtcgaagagaatcccggtccgatggccctcccagtaactgccctccttttgcccctcgcactccttcttcatgccgctcgccccaactgggtcaacgtgattagcgatttgaagaaaatcgaggaccttatacagtctatgcatattgacgctacactgtatactgagagtgatgtacacccgtcctgtaaggtaacggccatgaaatgctttcttctggagctccaggtcatcagcttggagtctggggacgcaagcatccacgatacggttgaaaacctcatcatccttgcgaacaactctctctcatctaatggaaacgttacagagagtgggtgtaaggagtgcgaagagttggaagaaaaaaacatcaaagaatttcttcaatccttcgttcacatagtgcaaatgttcattaacacgtccactaccacacccgccccgaggccacctacgccggcaccgactatcgccagtcaacccctctctctgcgccccgaggcttgccggcctgcggctggtggggcggtccacacccggggcctggattttgcgtgcgatatatacatctgggcacctcttgccggcacctgcggagtgctgcttctctcactcgttattacgctgtactgctaa

SEQ ID NO: 233 - DNA, 2121 bp, synthetic construct
  source 1..2121: mol_type = other DNA
atggccttaccagtgaccgccttgctcctgccgctggccttgctgctccacgccgccaggccgcaggtgcagctggtgcagtctggggctgaggtgaagaagcctggggcctcagtgaaggtttcctgcaaggcatctggatacatcttcaccgattactatatgcactgggtgcgacaggcccctggacaagggcttgagtggatgggaataatcaaccctagtggtggagatacactttacgcacagaagttccagggcagagtcaccatgaccagggacacgtccacgagcacagtctacatggagctgagcagcctgagatctgaggacacggccgtgtattactgtgctagagaaggcgtaggagctatgggcgtgtttgactactggggccaagggaccctggtcaccgtctcctcaggtggaggcggttcaggcggaggtggctctggcggtggcggatcggacatccagatgacccagtctccatcctccctgtctgcatctgtaggagacagagtcaccatcacttgccgggcaagtaccagcattagcgattatgtgcattggtatcagcagaaaccagggaaagcccctaagctcctgatctatgatgcatccagtttgcaaagtggggtcccatcaaggttcagtggcagtggatctgggacagatttcactctcaccatcagcagtctgcaacctgaagattttgcaacttactactgtcaacagagtgatagtacccctcccactttcggcggagggaccaaggtggagatcaaaaccacgacgccagcgccgcggccaccaacaccggcgcccaccatcgcgtcgcagcccctgtccctgcgcccagaggcgtgccggccagcggcggggggcgcagtgcacacgagggggctggacttcgcctgtgatatctacatctgggcgcccttggccgggacttgtggggtccttctcctgtcactggttatcaccctttactgccggagggaccagaggctgccccccgatgcccacaagccccctgggggaggcagtttccggacccccatccaagaggagcaggccgacgcccactccaccctggccaagatcagagtgaagttcagcaggagcgcagacgcccccgcgtaccagcagggccagaaccagctctataacgagctcaatctaggacgaagagaggagtacgatgttttggacaagagacgtggccgggaccctgagatggggggaaagccgagaaggaagaaccctcaggaaggcctgtacaatgaactgcagaaagataagatggcggaggcctacagtgagattgggatgaaaggcgagcgccggaggggcaaggggcacgatggcctttaccagggtctcagtacagccaccaaggacacctacgacgcccttcacatgcaggccctgccccctcgcggctctggcgagggaaggggttccctgcttacttgcggcgacgtcgaagagaatcccggtccgatggccctcccagtaactgccctccttttgcccctcgcactccttcttcatgccgctcgccccaactgggtcaacgtgattagcgatttgaagaaaatcgaggaccttatacagtctatgcatattgacgctacactgtatactgagagtgatgtacacccgtcctgtaaggtaacggccatgaaatgctttcttctggagctccaggtcatcagcttggagtctggggacgcaagcatccacgatacggttgaaaacctcatcatccttgcgaacaactctctctcatctaatggaaacgttacagagagtgggtgtaaggagtgcgaagagttggaagaaaaaaacatcaaagaatttcttcaatccttcgttcacatagtgcaaatgttcattaacacgtccactaccacacccgccccgaggccacctacgccggcaccgactatcgccagtcaacccctctctctgcgccccgaggcttgccggcctgcggctggtggggcggtccacacccggggcctggattttgcgtgcgatatatacatctgggcacctcttgccggcacctgcggagtgctgcttctctcactcgttattacgctgtactgctaa

SEQ ID NO: 234 - DNA, 2127 bp, synthetic construct
  source 1..2127: mol_type = other DNA
atggccttaccagtgaccgccttgctcctgccgctggccttgctgctccacgccgccaggccgcaggtgcagctggtgcagtctggggctgaggtgaagaagcctggggcctcagtgaaggtttcctgcaaggcatctggatacaccttcaccgatcactatatccactgggtgcgacaggcccctggacaagggcttgagtggatgggatggatcagtgcgtacaatggtaaaacaaattacgcacagaagttccagggcagagtcaccatgaccagggacacgtccacgagcacagtctacatggagctgagcagcctgagatctgaggacacggccgtgtattactgtgctagagacacaatctactatgacttttggagtgggtacgactactggggccaagggaccctggtcaccgtctcctcaggtggaggcggttcaggcggaggtggctctggcggtggcggatcggacatccagatgacccagtctccatcctccctgtctgcatctgtaggagacagagtcaccatcacttgccgggcaagtcagggaattagcaataatttaaattggtatcagcagaaaccagggaaagcccctaagctcctgatctattacgcatccaccttgcaaagtggggtcccatcaaggttcagtggcagtggatctgggacagatttcactctcaccatcagcagtctgcaacctgaagattttgcaacttactactgtcaacagagttacagtacccctatcaccttcggccaagggacacgactggagattaaaaccacgacgccagcgccgcggccaccaacaccggcgcccaccatcgcgtcgcagcccctgtccctgcgcccagaggcgtgccggccagcggcggggggcgcagtgcacacgagggggctggacttcgcctgtgatatctacatctgggcgcccttggccgggacttgtggggtccttctcctgtcactggttatcaccctttactgccggagggaccagaggctgccccccgatgcccacaagccccctgggggaggcagtttccggacccccatccaagaggagcaggccgacgcccactccaccctggccaagatcagagtgaagttcagcaggagcgcagacgcccccgcgtaccagcagggccagaaccagctctataacgagctcaatctaggacgaagagaggagtacgatgttttggacaagagacgtggccgggaccctgagatggggggaaagccgagaaggaagaaccctcaggaaggcctgtacaatgaactgcagaaagataagatggcggaggcctacagtgagattgggatgaaaggcgagcgccggaggggcaaggggcacgatggcctttaccagggtctcagtacagccaccaaggacacctacgacgcccttcacatgcaggccctgccccctcgcggctctggcgagggaaggggttccctgcttacttgcggcgacgtcgaagagaatcccggtccgatggccctcccagtaactgccctccttttgcccctcgcactccttcttcatgccgctcgccccaactgggtcaacgtgattagcgatttgaagaaaatcgaggaccttatacagtctatgcatattgacgctacactgtatactgagagtgatgtacacccgtcctgtaaggtaacggccatgaaatgctttcttctggagctccaggtcatcagcttggagtctggggacgcaagcatccacgatacggttgaaaacctcatcatccttgcgaacaactctctctcatctaatggaaacgttacagagagtgggtgtaaggagtgcgaagagttggaagaaaaaaacatcaaagaatttcttcaatccttcgttcacatagtgcaaatgttcattaacacgtccactaccacacccgccccgaggccacctacgccggcaccgactatcgccagtcaacccctctctctgcgccccgaggcttgccggcctgcggctggtggggcggtccacacccggggcctggattttgcgtgcgatatatacatctgggcacctcttgccggcacctgcggagtgctgcttctctcactcgttattacgctgtactgctaa

SEQ ID NO: 235 - DNA, 2127 bp, synthetic construct
  source 1..2127: mol_type = other DNA
atggccttaccagtgaccgccttgctcctgccgctggccttgctgctccacgccgccaggccgcaggtgcagctggtgcagtctggggctgaggtgaagaagcctggggcctcagtgaaggtttcctgcaaggcatctggatacaccttcaccagctactatatgcactgggtgcgacaggcccctggacaagggcttgagtggatgggaataatcaaccctagtggtggcgcgacaatctacgcacagaagttccagggcagagtcaccatgaccagggacacgtccacgagcacagtctacatggagctgagcagcctgagatctgaggacacggccgtgtattactgtgctagatctcgcggtgactactatggaagcggggattttgactactggggccaagggaccctggtcaccgtctcctcaggtggaggcggttcaggcggaggtggctctggcggtggcggatcggacatccagatgacccagtctccatcctccctgtctgcatctgtaggagacagagtcaccatcacttgccgggcaagtcagacgattagcaattatttaaattggtatcagcagaaaccagggaaagcccctaagctcctgatctatgatgcatccacgttggaagccggggtcccatcaaggttcagtggcagtggatctgggacagatttcactctcaccatcagcagtctgcaacctgaagattttgcaacttactactgtcaacagagttacaaccctccatacacttttggccaggggaccaagctggagatcaaaaccacgacgccagcgccgcggccaccaacaccggcgcccaccatcgcgtcgcagcccctgtccctgcgcccagaggcgtgccggccagcggcggggggcgcagtgcacacgagggggctggacttcgcctgtgatatctacatctgggcgcccttggccgggacttgtggggtccttctcctgtcactggttatcaccctttactgccggagggaccagaggctgccccccgatgcccacaagccccctgggggaggcagtttccggacccccatccaagaggagcaggccgacgcccactccaccctggccaagatcagagtgaagttcagcaggagcgcagacgcccccgcgtaccagcagggccagaaccagctctataacgagctcaatctaggacgaagagaggagtacgatgttttggacaagagacgtggccgggaccctgagatggggggaaagccgagaaggaagaaccctcaggaaggcctgtacaatgaactgcagaaagataagatggcggaggcctacagtgagattgggatgaaaggcgagcgccggaggggcaaggggcacgatggcctttaccagggtctcagtacagccaccaaggacacctacgacgcccttcacatgcaggccctgccccctcgcggctctggcgagggaaggggttccctgcttacttgcggcgacgtcgaagagaatcccggtccgatggccctcccagtaactgccctccttttgcccctcgcactccttcttcatgccgctcgccccaactgggtcaacgtgattagcgatttgaagaaaatcgaggaccttatacagtctatgcatattgacgctacactgtatactgagagtgatgtacacccgtcctgtaaggtaacggccatgaaatgctttcttctggagctccaggtcatcagcttggagtctggggacgcaagcatccacgatacggttgaaaacctcatcatccttgcgaacaactctctctcatctaatggaaacgttacagagagtgggtgtaaggagtgcgaagagttggaagaaaaaaacatcaaagaatttcttcaatccttcgttcacatagtgcaaatgttcattaacacgtccactaccacacccgccccgaggccacctacgccggcaccgactatcgccagtcaacccctctctctgcgccccgaggcttgccggcctgcggctggtggggcggtccacacccggggcctggattttgcgtgcgatatatacatctgggcacctcttgccggcacctgcggagtgctgcttctctcactcgttattacgctgtactgctaa

SEQ ID NO: 236 - DNA, 2115 bp, synthetic construct
  source 1..2115: mol_type = other DNA
atggccttaccagtgaccgccttgctcctgccgctggccttgctgctccacgccgccaggccgcaggtgcagctggtgcagtctggggctgaggtgaagaagcctggggcctcagtgaaggtttcctgcaaggcatctggatacaccttcaccgattactatatgcactgggtgcgacaggcccctggacaagggcttgagtggatgggaataatcaaccctagtggtggaagcacaagctacgcacagaagttccagggcagagtcaccatgaccagggacacgtccacgagcacagtctacatggagctgagcagcctgagatctgaggacacggccgtgtattactgtgctagaggatattttgatcacgcattcgatatctggggccaagggacaatggtcaccgtctcttcaggtggaggcggttcaggcggaggtggctctggcggtggcggatcggacatccagatgacccagtctccatcctccctgtctgcatctgtaggagacagagtcaccatcacttgccgggcaagtcagagcattagcacttatttaaattggtatcagcagaaaccagggaaagcccctaagctcctgatctatgatgcatccaacttggagatcggggtcccatcaaggttcagtggcagtggatctgggacagatttcactctcaccatcagcagtctgcaacctgaagattttgcaacttactactgtcaacagagtgacagttcaccactcactttcggccaggggaccaaggtggagatcaaaaccacgacgccagcgccgcggccaccaacaccggcgcccaccatcgcgtcgcagcccctgtccctgcgcccagaggcgtgccggccagcggcggggggcgcagtgcacacgagggggctggacttcgcctgtgatatctacatctgggcgcccttggccgggacttgtggggtccttctcctgtcactggttatcaccctttactgccggagggaccagaggctgccccccgatgcccacaagccccctgggggaggcagtttccggacccccatccaagaggagcaggccgacgcccactccaccctggccaagatcagagtgaagttcagcaggagcgcagacgcccccgcgtaccagcagggccagaaccagctctataacgagctcaatctaggacgaagagaggagtacgatgttttggacaagagacgtggccgggaccctgagatggggggaaagccgagaaggaagaaccctcaggaaggcctgtacaatgaactgcagaaagataagatggcggaggcctacagtgagattgggatgaaaggcgagcgccggaggggcaaggggcacgatggcctttaccagggtctcagtacagccaccaaggacacctacgacgcccttcacatgcaggccctgccccctcgcggctctggcgagggaaggggttccctgcttacttgcggcgacgtcgaagagaatcccggtccgatggccctcccagtaactgccctccttttgcccctcgcactccttcttcatgccgctcgccccaactgggtcaacgtgattagcgatttgaagaaaatcgaggaccttatacagtctatgcatattgacgctacactgtatactgagagtgatgtacacccgtcctgtaaggtaacggccatgaaatgctttcttctggagctccaggtcatcagcttggagtctggggacgcaagcatccacgatacggttgaaaacctcatcatccttgcgaacaactctctctcatctaatggaaacgttacagagagtgggtgtaaggagtgcgaagagttggaagaaaaaaacatcaaagaatttcttcaatccttcgttcacatagtgcaaatgttcattaacacgtccactaccacacccgccccgaggccacctacgccggcaccgactatcgccagtcaacccctctctctgcgccccgaggcttgccggcctgcggctggtggggcggtccacacccggggcctggattttgcgtgcgatatatacatctgggcacctcttgccggcacctgcggagtgctgcttctctcactcgttattacgctgtactgctaa

SEQ ID NO: 237 - DNA, 2133 bp, synthetic construct
  source 1..2133: mol_type = other DNA
atggccttaccagtgaccgccttgctcctgccgctggccttgctgctccacgccgccaggccgcaggtgcagctggtgcagtctggggctgaggtgaagaagcctggggcctcagtgaaggtttcctgcaaggcatctggatacaccttcaccggttactatatgcactgggtgcgacaggcccctggacaagggcttgagtggatgggaataatcaaccctagtggtggggatacaatatacgcacagaagttccagggcagagtcaccatgaccagggacacgtccacgagcacagtctacatggagctgagcagcctgagatctgaggacacggccgtgtattactgtgctagaggtgactcgtcttcatggtacgactattactactacatggacgtctggggcaaagggaccacggtcaccgtctcctcaggtggaggcggttcaggcggaggtggctctggcggtggcggatcggacatccagatgacccagtctccatcctccctgtctgcatctgtaggagacagagtcaccatcacttgccaagcaagtcaggatattagcaactatttaaattggtatcagcagaaaccagggaaagcccctaagctcctgatctatgctgcatccagtttgcaaagtggggtcccatcaaggttcagtggcagtggatctgggacagatttcactctcaccatcagcagtctgcaacctgaagattttgcaacttactactgtcaacagagttaccggacccctctcactttcggcggagggaccaaggtggagatcaaaaccacgacgccagcgccgcggccaccaacaccggcgcccaccatcgcgtcgcagcccctgtccctgcgcccagaggcgtgccggccagcggcggggggcgcagtgcacacgagggggctggacttcgcctgtgatatctacatctgggcgcccttggccgggacttgtggggtccttctcctgtcactggttatcaccctttactgccggagggaccagaggctgccccccgatgcccacaagccccctgggggaggcagtttccggacccccatccaagaggagcaggccgacgcccactccaccctggccaagatcagagtgaagttcagcaggagcgcagacgcccccgcgtaccagcagggccagaaccagctctataacgagctcaatctaggacgaagagaggagtacgatgttttggacaagagacgtggccgggaccctgagatggggggaaagccgagaaggaagaaccctcaggaaggcctgtacaatgaactgcagaaagataagatggcggaggcctacagtgagattgggatgaaaggcgagcgccggaggggcaaggggcacgatggcctttaccagggtctcagtacagccaccaaggacacctacgacgcccttcacatgcaggccctgccccctcgcggctctggcgagggaaggggttccctgcttacttgcggcgacgtcgaagagaatcccggtccgatggccctcccagtaactgccctccttttgcccctcgcactccttcttcatgccgctcgccccaactgggtcaacgtgattagcgatttgaagaaaatcgaggaccttatacagtctatgcatattgacgctacactgtatactgagagtgatgtacacccgtcctgtaaggtaacggccatgaaatgctttcttctggagctccaggtcatcagcttggagtctggggacgcaagcatccacgatacggttgaaaacctcatcatccttgcgaacaactctctctcatctaatggaaacgttacagagagtgggtgtaaggagtgcgaagagttggaagaaaaaaacatcaaagaatttcttcaatccttcgttcacatagtgcaaatgttcattaacacgtccactaccacacccgccccgaggccacctacgccggcaccgactatcgccagtcaacccctctctctgcgccccgaggcttgccggcctgcggctggtggggcggtccacacccggggcctggattttgcgtgcgatatatacatctgggcacctcttgccggcacctgcggagtgctgcttctctcactcgttattacgctgtactgctaa

SEQ ID NO: 238 - DNA, 2118 bp, synthetic construct
  source 1..2118: mol_type = other DNA
atggccttaccagtgaccgccttgctcctgccgctggccttgctgctccacgccgccaggccgcaggtgcagctggtgcagtctggggctgaggtgaagaagcctggggcctcagtgaaggtttcctgcaaggcatctggatacaccttcaccgactactttacccactgggtgcgacaggcccctggacaagggcttgagtggatgggatggatcaacacatatgacggtaatacaaattacgcacagaagttccagggcagagtcaccatgaccagggacacgtccacgagcacagtctacatggagctgagcagcctgagatctgaggacacggccgtgtattactgtgctagagaaatggagtggctcggccaggtggactactggggccaagggaccctggtcaccgtctcctcaggtggaggcggttcaggcggaggtggctctggcggtggcggatcggacatccagatgacccagtctccatcctccctgtctgcatctgtaggagacagagtcaccatcacttgccgggcaagtcaggatattcgcaacgatttagggtggtatcagcagaaaccagggaaagcccctaagctcctgatctatgctgcatccaacttggagaccggggtcccatcaaggttcagtggcagtggatctgggacagatttcactctcaccatcagcagtctgcaacctgaagattttgcaacttactactgtcaacagagttacagtgcacctttcactttcggccctgggaccaaagtggatatcaaaaccacgacgccagcgccgcggccaccaacaccggcgcccaccatcgcgtcgcagcccctgtccctgcgcccagaggcgtgccggccagcggcggggggcgcagtgcacacgagggggctggacttcgcctgtgatatctacatctgggcgcccttggccgggacttgtggggtccttctcctgtcactggttatcaccctttactgccggagggaccagaggctgccccccgatgcccacaagccccctgggggaggcagtttccggacccccatccaagaggagcaggccgacgcccactccaccctggccaagatcagagtgaagttcagcaggagcgcagacgcccccgcgtaccagcagggccagaaccagctctataacgagctcaatctaggacgaagagaggagtacgatgttttggacaagagacgtggccgggaccctgagatggggggaaagccgagaaggaagaaccctcaggaaggcctgtacaatgaactgcagaaagataagatggcggaggcctacagtgagattgggatgaaaggcgagcgccggaggggcaaggggcacgatggcctttaccagggtctcagtacagccaccaaggacacctacgacgcccttcacatgcaggccctgccccctcgcggctctggcgagggaaggggttccctgcttacttgcggcgacgtcgaagagaatcccggtccgatggccctcccagtaactgccctccttttgcccctcgcactccttcttcatgccgctcgccccaactgggtcaacgtgattagcgatttgaagaaaatcgaggaccttatacagtctatgcatattgacgctacactgtatactgagagtgatgtacacccgtcctgtaaggtaacggccatgaaatgctttcttctggagctccaggtcatcagcttggagtctggggacgcaagcatccacgatacggttgaaaacctcatcatccttgcgaacaactctctctcatctaatggaaacgttacagagagtgggtgtaaggagtgcgaagagttggaagaaaaaaacatcaaagaatttcttcaatccttcgttcacatagtgcaaatgttcattaacacgtccactaccacacccgccccgaggccacctacgccggcaccgactatcgccagtcaacccctctctctgcgccccgaggcttgccggcctgcggctggtggggcggtccacacccggggcctggattttgcgtgcgatatatacatctgggcacctcttgccggcacctgcggagtgctgcttctctcactcgttattacgctgtactgctaa

SEQ ID NO: 239 - DNA, 2118 bp, synthetic construct
  source 1..2118: mol_type = other DNA
atggccttaccagtgaccgccttgctcctgccgctggccttgctgctccacgccgccaggccgcaggtgcagctggtgcagtctggggctgaggtgaagaagcctggggcctcagtgaaggtttcctgcaaggcatctggatacaccttcaccagctactatatacactgggtgcgacaggcccctggacaagggcttgagtggatgggacgaatcaaccctaatggtggagggacaaactacgcacagaagttccagggcagagtcaccatgaccagggacacgtccacgagcacagtctacatggagctgagcagcctgagatctgaggacacggccgtgtattactgtgctagaggccacagagggggtggcgggattgactactggggccaagggaccctggtcaccgtctcctcaggtggaggcggttcaggcggaggtggctctggcggtggcggatcggacatccagatgacccagtctccatcctccctgtctgcatctgtaggagacagagtcaccatcacttgccgggcaagtcaggagattagcaactatttagcctggtatcagcagaaaccagggaaagcccctaagctcctgatctatgatgcatccaacttgcaaactggggtcccatcaaggttcagtggcagtggatctgggacagatttcactctcaccatcagcagtctgcaacctgaagattttgcaacttactactgtcaacagagttacagtacccctttcactttcggccctgggaccaaagtggatatcaaaaccacgacgccagcgccgcggccaccaacaccggcgcccaccatcgcgtcgcagcccctgtccctgcgcccagaggcgtgccggccagcggcggggggcgcagtgcacacgagggggctggacttcgcctgtgatatctacatctgggcgcccttggccgggacttgtggggtccttctcctgtcactggttatcaccctttactgccggagggaccagaggctgccccccgatgcccacaagccccctgggggaggcagtttccggacccccatccaagaggagcaggccgacgcccactccaccctggccaagatcagagtgaagttcagcaggagcgcagacgcccccgcgtaccagcagggccagaaccagctctataacgagctcaatctaggacgaagagaggagtacgatgttttggacaagagacgtggccgggaccctgagatggggggaaagccgagaaggaagaaccctcaggaaggcctgtacaatgaactgcagaaagataagatggcggaggcctacagtgagattgggatgaaaggcgagcgccggaggggcaaggggcacgatggcctttaccagggtctcagtacagccaccaaggacacctacgacgcccttcacatgcaggccctgccccctcgcggctctggcgagggaaggggttccctgcttacttgcggcgacgtcgaagagaatcccggtccgatggccctcccagtaactgccctccttttgcccctcgcactccttcttcatgccgctcgccccaactgggtcaacgtgattagcgatttgaagaaaatcgaggaccttatacagtctatgcatattgacgctacactgtatactgagagtgatgtacacccgtcctgtaaggtaacggccatgaaatgctttcttctggagctccaggtcatcagcttggagtctggggacgcaagcatccacgatacggttgaaaacctcatcatccttgcgaacaactctctctcatctaatggaaacgttacagagagtgggtgtaaggagtgcgaagagttggaagaaaaaaacatcaaagaatttcttcaatccttcgttcacatagtgcaaatgttcattaacacgtccactaccacacccgccccgaggccacctacgccggcaccgactatcgccagtcaacccctctctctgcgccccgaggcttgccggcctgcggctggtggggcggtccacacccggggcctggattttgcgtgcgatatatacatctgggcacctcttgccggcacctgcggagtgctgcttctctcactcgttattacgctgtactgctaa

SEQ ID NO: 240 - DNA, 2118 bp, synthetic construct
  source 1..2118: mol_type = other DNA
atggccttaccagtgaccgccttgctcctgccgctggccttgctgctccacgccgccaggccgcaggtgcagctggtgcagtctggggctgaggtgaagaagcctggggcctcagtgaaggtttcctgcaaggcatctggaggtaccttcagtagctacgcaatttcatgggtgcgacaggcccctggacaagggcttgagtggatgggatggatctctcccaacagtggtgacacacactacgcacagaagttccagggcagagtcaccatgaccagggacacgtccacgagcacagtctacatggagctgagcagcctgagatctgaggacacggccgtgtattactgtgctagagactgggggtcaggctggtacgtggactactggggccaagggaccctggtcaccgtctcctcaggtggaggcggttcaggcggaggtggctctggcggtggcggatcggacatccagatgacccagtctccatcctccctgtctgcatctgtaggagacagagtcaccatcacttgccaggcaagtcaggacattagcgattctttaaattggtatcagcagaaaccagggaaagcccctaagctcctgatctattccgcatccagtttgcaaagtggggtcccatcaaggttcagtggcagtggatctgggacagatttcactctcaccatcagcagtctgcaacctgaagattttgcaacttactactgtcaacagagttttacaaccccttatacgttcggccaagggaccaaggtggaaatcaaaaccacgacgccagcgccgcggccaccaacaccggcgcccaccatcgcgtcgcagcccctgtccctgcgcccagaggcgtgccggccagcggcggggggcgcagtgcacacgagggggctggacttcgcctgtgatatctacatctgggcgcccttggccgggacttgtggggtccttctcctgtcactggttatcaccctttactgccggagggaccagaggctgccccccgatgcccacaagccccctgggggaggcagtttccggacccccatccaagaggagcaggccgacgcccactccaccctggccaagatcagagtgaagttcagcaggagcgcagacgcccccgcgtaccagcagggccagaaccagctctataacgagctcaatctaggacgaagagaggagtacgatgttttggacaagagacgtggccgggaccctgagatggggggaaagccgagaaggaagaaccctcaggaaggcctgtacaatgaactgcagaaagataagatggcggaggcctacagtgagattgggatgaaaggcgagcgccggaggggcaaggggcacgatggcctttaccagggtctcagtacagccaccaaggacacctacgacgcccttcacatgcaggccctgccccctcgcggctctggcgagggaaggggttccctgcttacttgcggcgacgtcgaagagaatcccggtccgatggccctcccagtaactgccctccttttgcccctcgcactccttcttcatgccgctcgccccaactgggtcaacgtgattagcgatttgaagaaaatcgaggaccttatacagtctatgcatattgacgctacactgtatactgagagtgatgtacacccgtcctgtaaggtaacggccatgaaatgctttcttctggagctccaggtcatcagcttggagtctggggacgcaagcatccacgatacggttgaaaacctcatcatccttgcgaacaactctctctcatctaatggaaacgttacagagagtgggtgtaaggagtgcgaagagttggaagaaaaaaacatcaaagaatttcttcaatccttcgttcacatagtgcaaatgttcattaacacgtccactaccacacccgccccgaggccacctacgccggcaccgactatcgccagtcaacccctctctctgcgccccgaggcttgccggcctgcggctggtggggcggtccacacccggggcctggattttgcgtgcgatatatacatctgggcacctcttgccggcacctgcggagtgctgcttctctcactcgttattacgctgtactgctaa

SEQ ID NO: 241 - DNA, 2118 bp, synthetic construct
  source 1..2118: mol_type = other DNA
atggccttaccagtgaccgccttgctcctgccgctggccttgctgctccacgccgccaggccgcaggtgcagctggtgcagtctggggctgaggtgaagaagcctgggtcctcggtgaaggtctcctgcaaggcttctggaggcaccttcaatagctatggaatcagctgggtgcgacaggcccctggacaagggcttgagtggatgggaggtatcatccctatctttggtacagcaaactacgcacagaagttccagggcagagtcacgattaccgcggacgaatccacgagcacagcctacatggagctgagcagcctgagatctgaggacacggccgtgtattactgtgcgagagatacctacggggatgacgcttttgatatctggggccaagggacaatggtcaccgtctcttcaggtggaggcggttcaggcggaggtggctctggcggtggcggatcggacatccagatgacccagtctccatcttctctgtctgcatctgtaggagacagagtcaccatcacttgtcgggcgagtcagtctattagcagctggttagcctggtatcagcagaaaccagggaaagcccctaagctcctgatctatgatgcatccaatttggaaacaggggtcccatcaaggttcagcggcagtggatctgggacagatttcactctcactatcagcagcctgcagcctgaagattttgcaacttactattgtcaacagaatttcagtcctcctctcaccttcggccaagggacacgactggagattaaaaccacgacgccagcgccgcggccaccaacaccggcgcccaccatcgcgtcgcagcccctgtccctgcgcccagaggcgtgccggccagcggcggggggcgcagtgcacacgagggggctggacttcgcctgtgatatctacatctgggcgcccttggccgggacttgtggggtccttctcctgtcactggttatcaccctttactgccggagggaccagaggctgccccccgatgcccacaagccccctgggggaggcagtttccggacccccatccaagaggagcaggccgacgcccactccaccctggccaagatcagagtgaagttcagcaggagcgcagacgcccccgcgtaccagcagggccagaaccagctctataacgagctcaatctaggacgaagagaggagtacgatgttttggacaagagacgtggccgggaccctgagatggggggaaagccgagaaggaagaaccctcaggaaggcctgtacaatgaactgcagaaagataagatggcggaggcctacagtgagattgggatgaaaggcgagcgccggaggggcaaggggcacgatggcctttaccagggtctcagtacagccaccaaggacacctacgacgcccttcacatgcaggccctgccccctcgcggctctggcgagggaaggggttccctgcttacttgcggcgacgtcgaagagaatcccggtccgatggccctcccagtaactgccctccttttgcccctcgcactccttcttcatgccgctcgccccaactgggtcaacgtgattagcgatttgaagaaaatcgaggaccttatacagtctatgcatattgacgctacactgtatactgagagtgatgtacacccgtcctgtaaggtaacggccatgaaatgctttcttctggagctccaggtcatcagcttggagtctggggacgcaagcatccacgatacggttgaaaacctcatcatccttgcgaacaactctctctcatctaatggaaacgttacagagagtgggtgtaaggagtgcgaagagttggaagaaaaaaacatcaaagaatttcttcaatccttcgttcacatagtgcaaatgttcattaacacgtccactaccacacccgccccgaggccacctacgccggcaccgactatcgccagtcaacccctctctctgcgccccgaggcttgccggcctgcggctggtggggcggtccacacccggggcctggattttgcgtgcgatatatacatctgggcacctcttgccggcacctgcggagtgctgcttctctcactcgttattacgctgtactgctaa

SEQ ID NO: 242 - DNA, 2133 bp, synthetic construct
  source 1..2133: mol_type = other DNA
atggccttaccagtgaccgccttgctcctgccgctggccttgctgctccacgccgccaggccgcaggtgcagctggtgcagtctggggctgaggtgaagaagcctggggcctcagtgaaggtttcctgcaaggcatctggatacagtttcaccagctactatatgcactgggtgcgacaggcccctggacaagggcttgagtggatgggaataatcaaccctagtggtgggactacaagctacgcacagaagttccagggcagagtcaccatgaccagggacacgtccacgagcacagtctacatggagctgagcagcctgagatctgaggacacggccgtgtattactgtgctagagacaattccccgtatagctcaagctggtgggactactttgactactggggccaagggaccctggtcaccgtctcctcaggtggaggcggttcaggcggaggtggctctggcggtggcggatcggacatccagatgacccagtctccatcctccctgtctgcatctgtaggagacagagtcaccatcacttgccgggcaagtcaggacattcggcattatttagcatggtatcagcagaaaccagggaaagcccctaagctcctgatctatgacgcatccagtttgcaaagtggggtcccatcaaggttcagtggcagtggatctgggacagatttcactctcaccatcagcagtctgcaacctgaagattttgcaacttactactgtcaacagacctacgacgcacctatcaccttcggccaagggacacgactggagattaaaaccacgacgccagcgccgcggccaccaacaccggcgcccaccatcgcgtcgcagcccctgtccctgcgcccagaggcgtgccggccagcggcggggggcgcagtgcacacgagggggctggacttcgcctgtgatatctacatctgggcgcccttggccgggacttgtggggtccttctcctgtcactggttatcaccctttactgccggagggaccagaggctgccccccgatgcccacaagccccctgggggaggcagtttccggacccccatccaagaggagcaggccgacgcccactccaccctggccaagatcagagtgaagttcagcaggagcgcagacgcccccgcgtaccagcagggccagaaccagctctataacgagctcaatctaggacgaagagaggagtacgatgttttggacaagagacgtggccgggaccctgagatggggggaaagccgagaaggaagaaccctcaggaaggcctgtacaatgaactgcagaaagataagatggcggaggcctacagtgagattgggatgaaaggcgagcgccggaggggcaaggggcacgatggcctttaccagggtctcagtacagccaccaaggacacctacgacgcccttcacatgcaggccctgccccctcgcggctctggcgagggaaggggttccctgcttacttgcggcgacgtcgaagagaatcccggtccgatggccctcccagtaactgccctccttttgcccctcgcactccttcttcatgccgctcgccccaactgggtcaacgtgattagcgatttgaagaaaatcgaggaccttatacagtctatgcatattgacgctacactgtatactgagagtgatgtacacccgtcctgtaaggtaacggccatgaaatgctttcttctggagctccaggtcatcagcttggagtctggggacgcaagcatccacgatacggttgaaaacctcatcatccttgcgaacaactctctctcatctaatggaaacgttacagagagtgggtgtaaggagtgcgaagagttggaagaaaaaaacatcaaagaatttcttcaatccttcgttcacatagtgcaaatgttcattaacacgtccactaccacacccgccccgaggccacctacgccggcaccgactatcgccagtcaacccctctctctgcgccccgaggcttgccggcctgcggctggtggggcggtccacacccggggcctggattttgcgtgcgatatatacatctgggcacctcttgccggcacctgcggagtgctgcttctctcactcgttattacgctgtactgctaa

SEQ ID NO: 243 - DNA, 2127 bp, synthetic construct
  source 1..2127: mol_type = other DNA
atggccttaccagtgaccgccttgctcctgccgctggccttgctgctccacgccgccaggccgcaggtgcagctggtgcagtctggggctgaggtgaagaagcctggggcctcagtgaaggtttcctgcaaggcatctggatacaccttcaccgattactatattcactgggtgcgacaggcccctggacaagggcttgagtggatgggatggatcaccccgaacagtggttatacatattacgcacagaatttccagggcagagtcaccatgaccagggacacgtccacgagcacagtctacatggagctgagcagcctgagatctgaggacacggccgtgtattactgtgctagaaacacagactgttatggggacttcctggggctggatgtctggggccaagggacaacggtcaccgtctcttcaggtggaggcggttcaggcggaggtggctctggcggtggcggatcggacatcgtgatgacccagtctccagactccctggctgtgtctctgggcgagagggccaccatcaactgccgggccagctctagtatttccaactacttagcttggtaccagcagaaaccaggacagcctcctaagctgctcatttacggcgcatctacccgggcttccggggtccctgaccgattcagtggcagcgggtctgggacagatttcactctcaccatcagcagcctgcaggctgaagatgtggcagtttattactgtcagcaaagctatagtactcctctcactttcggccaggggaccaaggtggagatcaaaaccacgacgccagcgccgcggccaccaacaccggcgcccaccatcgcgtcgcagcccctgtccctgcgcccagaggcgtgccggccagcggcggggggcgcagtgcacacgagggggctggacttcgcctgtgatatctacatctgggcgcccttggccgggacttgtggggtccttctcctgtcactggttatcaccctttactgccggagggaccagaggctgccccccgatgcccacaagccccctgggggaggcagtttccggacccccatccaagaggagcaggccgacgcccactccaccctggccaagatcagagtgaagttcagcaggagcgcagacgcccccgcgtaccagcagggccagaaccagctctataacgagctcaatctaggacgaagagaggagtacgatgttttggacaagagacgtggccgggaccctgagatggggggaaagccgagaaggaagaaccctcaggaaggcctgtacaatgaactgcagaaagataagatggcggaggcctacagtgagattgggatgaaaggcgagcgccggaggggcaaggggcacgatggcctttaccagggtctcagtacagccaccaaggacacctacgacgcccttcacatgcaggccctgccccctcgcggctctggcgagggaaggggttccctgcttacttgcggcgacgtcgaagagaatcccggtccgatggccctcccagtaactgccctccttttgcccctcgcactccttcttcatgccgctcgccccaactgggtcaacgtgattagcgatttgaagaaaatcgaggaccttatacagtctatgcatattgacgctacactgtatactgagagtgatgtacacccgtcctgtaaggtaacggccatgaaatgctttcttctggagctccaggtcatcagcttggagtctggggacgcaagcatccacgatacggttgaaaacctcatcatccttgcgaacaactctctctcatctaatggaaacgttacagagagtgggtgtaaggagtgcgaagagttggaagaaaaaaacatcaaagaatttcttcaatccttcgttcacatagtgcaaatgttcattaacacgtccactaccacacccgccccgaggccacctacgccggcaccgactatcgccagtcaacccctctctctgcgccccgaggcttgccggcctgcggctggtggggcggtccacacccggggcctggattttgcgtgcgatatatacatctgggcacctcttgccggcacctgcggagtgctgcttctctcactcgttattacgctgtactgctaa

SEQ ID NO: 244 - DNA, 2127 bp, synthetic construct
  source 1..2127: mol_type = other DNA
atggccttaccagtgaccgccttgctcctgccgctggccttgctgctccacgccgccaggccgcaggtgcagctggtgcagtctggggctgaggtgaagaagcctggggcctcagtgaaggtttcctgcaaggcatctggatacaccttcaacggctaccttatgcactgggtgcgacaggcccctggacaagggcttgagtggatgggaatagttaacccttccgatggtagcacaggctacgcacagaagttccagggcagagtcaccatgaccagggacacgtccacgagcacagtctacatggagctgagcagcctgagatctgaggacacggccgtgtattactgtgcgaaggacacaggactccgctactttgactggctacttgactactggggccaagggaccctggtcaccgtctcctcaggtggaggcggttcaggcggaggtggctctggcggtggcggatcggacatccagatgacccagtctccatcctccctgtctgcatctgtaggagacagagtcaccatcacttgccgggcgagtcagggcattaccaattttttagcctggtatcagcagaaaccagggaaagcccctaagctcctgatatatgatgcatccaacttggaaaccggggtcccatccaggttcagtggcagtggatctgggacggatttcactctcaccatcagcagcctgcagcctgaagattttgcaacttattactgtcaacagagctatggggcccctcttaccttcggccaagggacacgactggagattaaaaccacgacgccagcgccgcggccaccaacaccggcgcccaccatcgcgtcgcagcccctgtccctgcgcccagaggcgtgccggccagcggcggggggcgcagtgcacacgagggggctggacttcgcctgtgatatctacatctgggcgcccttggccgggacttgtggggtccttctcctgtcactggttatcaccctttactgccggagggaccagaggctgccccccgatgcccacaagccccctgggggaggcagtttccggacccccatccaagaggagcaggccgacgcccactccaccctggccaagatcagagtgaagttcagcaggagcgcagacgcccccgcgtaccagcagggccagaaccagctctataacgagctcaatctaggacgaagagaggagtacgatgttttggacaagagacgtggccgggaccctgagatggggggaaagccgagaaggaagaaccctcaggaaggcctgtacaatgaactgcagaaagataagatggcggaggcctacagtgagattgggatgaaaggcgagcgccggaggggcaaggggcacgatggcctttaccagggtctcagtacagccaccaaggacacctacgacgcccttcacatgcaggccctgccccctcgcggctctggcgagggaaggggttccctgcttacttgcggcgacgtcgaagagaatcccggtccgatggccctcccagtaactgccctccttttgcccctcgcactccttcttcatgccgctcgccccaactgggtcaacgtgattagcgatttgaagaaaatcgaggaccttatacagtctatgcatattgacgctacactgtatactgagagtgatgtacacccgtcctgtaaggtaacggccatgaaatgctttcttctggagctccaggtcatcagcttggagtctggggacgcaagcatccacgatacggttgaaaacctcatcatccttgcgaacaactctctctcatctaatggaaacgttacagagagtgggtgtaaggagtgcgaagagttggaagaaaaaaacatcaaagaatttcttcaatccttcgttcacatagtgcaaatgttcattaacacgtccactaccacacccgccccgaggccacctacgccggcaccgactatcgccagtcaacccctctctctgcgccccgaggcttgccggcctgcggctggtggggcggtccacacccggggcctggattttgcgtgcgatatatacatctgggcacctcttgccggcacctgcggagtgctgcttctctcactcgttattacgctgtactgctaa

SEQ ID NO: 245 - DNA, 2115 bp, synthetic construct
  source 1..2115: mol_type = other DNA
atggccttaccagtgaccgccttgctcctgccgctggccttgctgctccacgccgccaggccgcaggtgcagctggtgcagtctggggctgaggtgaagaagcctggggcctcagtgaaggtttcctgcaaggcatctggatacaccttcaccagctactatatgcactgggtgcgacaggcccctggacaagggcttgagtggatgggaataatcgatcctagtggtggccgaacaatttacgcacagcgcttccagggcagagtcaccatgaccagggacacgtccacgagcacagtctacatggagctgagcagcctgagatctgaggacacggccgtgtattactgtgctagacacgaagcaggcggaatctttgactactggggccaagggaccctggtcaccgtctcctcaggtggaggcggttcaggcggaggtggctctggcggtggcggatcggacatccagatgacccagtctccatcctccctgtctgcatctgtaggagacagagtcaccatcacttgccaagcaagtcaggacattagcaactatttaaattggtatcagcagaaaccagggaaagcccctaagctcctgatctattccgcatccaccttgcaaagtggggtcccatcaaggttcagtggcagtggatctgggacagatttcactctcaccatcagcagtctgcaacctgaagattttgcaacttactactgtcaacagagttacagttctccttatagattcggccaagggaccaaggtggaaatcaaaaccacgacgccagcgccgcggccaccaacaccggcgcccaccatcgcgtcgcagcccctgtccctgcgcccagaggcgtgccggccagcggcggggggcgcagtgcacacgagggggctggacttcgcctgtgatatctacatctgggcgcccttggccgggacttgtggggtccttctcctgtcactggttatcaccctttactgccggagggaccagaggctgccccccgatgcccacaagccccctgggggaggcagtttccggacccccatccaagaggagcaggccgacgcccactccaccctggccaagatcagagtgaagttcagcaggagcgcagacgcccccgcgtaccagcagggccagaaccagctctataacgagctcaatctaggacgaagagaggagtacgatgttttggacaagagacgtggccgggaccctgagatggggggaaagccgagaaggaagaaccctcaggaaggcctgtacaatgaactgcagaaagataagatggcggaggcctacagtgagattgggatgaaaggcgagcgccggaggggcaaggggcacgatggcctttaccagggtctcagtacagccaccaaggacacctacgacgcccttcacatgcaggccctgccccctcgcggctctggcgagggaaggggttccctgcttacttgcggcgacgtcgaagagaatcccggtccgatggccctcccagtaactgccctccttttgcccctcgcactccttcttcatgccgctcgccccaactgggtcaacgtgattagcgatttgaagaaaatcgaggaccttatacagtctatgcatattgacgctacactgtatactgagagtgatgtacacccgtcctgtaaggtaacggccatgaaatgctttcttctggagctccaggtcatcagcttggagtctggggacgcaagcatccacgatacggttgaaaacctcatcatccttgcgaacaactctctctcatctaatggaaacgttacagagagtgggtgtaaggagtgcgaagagttggaagaaaaaaacatcaaagaatttcttcaatccttcgttcacatagtgcaaatgttcattaacacgtccactaccacacccgccccgaggccacctacgccggcaccgactatcgccagtcaacccctctctctgcgccccgaggcttgccggcctgcggctggtggggcggtccacacccggggcctggattttgcgtgcgatatatacatctgggcacctcttgccggcacctgcggagtgctgcttctctcactcgttattacgctgtactgctaa

SEQ ID NO: 246 - DNA, 2139 bp, synthetic construct
  source 1..2139: mol_type = other DNA
atggccttaccagtgaccgccttgctcctgccgctggccttgctgctccacgccgccaggccgcaggtccagctggtgcagtctggggctgaggtgaagaagcctgggtcctcagtgaaggtctcctgcaaggcttctggatataccttcagcgactcctacatgcattgggtgcgacaggcccctggacaagggcttgagtgggtcggagggatcatccctatggcaggtatacccgcctacgcagaggaattccagggcagagtcacgattaccgcggacgagtccacgagcacagcctacatggagctgagcagcctgagatctgaggacacggccgtgtattactgtgcgagagccgacgattatgggggaaattggtacttcgatctctggggccgtggcaccctggtcactgtctcctcaggtggaggcggttcaggcggaggtggctctggcggtggcggatcggatattgtgatgactcagtctccactctccctgcccgtcacccctggagagccggcctccatctcctgcaggtctagtcagagcctcctccactctaatggctacaactatttggattggtacctgcagaagccagggcagtctccacagctcctgatctatgcagcttctagtctccagtccggggtccctgacaggttcagtggcagtggatcaggcacagattttacactgaaaatcagcagagtggaggctgaggatgttggggtttattactgcatgcaaggggcccattggcctccgacttttggccaggggaccaagctggagatcaaaaccacgacgccagcgccgcggccaccaacaccggcgcccaccatcgcgtcgcagcccctgtccctgcgcccagaggcgtgccggccagcggcggggggcgcagtgcacacgagggggctggacttcgcctgtgatatctacatctgggcgcccttggccgggacttgtggggtccttctcctgtcactggttatcaccctttactgccggagggaccagaggctgccccccgatgcccacaagccccctgggggaggcagtttccggacccccatccaagaggagcaggccgacgcccactccaccctggccaagatcagagtgaagttcagcaggagcgcagacgcccccgcgtaccagcagggccagaaccagctctataacgagctcaatctaggacgaagagaggagtacgatgttttggacaagagacgtggccgggaccctgagatggggggaaagccgagaaggaagaaccctcaggaaggcctgtacaatgaactgcagaaagataagatggcggaggcctacagtgagattgggatgaaaggcgagcgccggaggggcaaggggcacgatggcctttaccagggtctcagtacagccaccaaggacacctacgacgcccttcacatgcaggccctgccccctcgcggctctggcgagggaaggggttccctgcttacttgcggcgacgtcgaagagaatcccggtccgatggccctcccagtaactgccctccttttgcccctcgcactccttcttcatgccgctcgccccaactgggtcaacgtgattagcgatttgaagaaaatcgaggaccttatacagtctatgcatattgacgctacactgtatactgagagtgatgtacacccgtcctgtaaggtaacggccatgaaatgctttcttctggagctccaggtcatcagcttggagtctggggacgcaagcatccacgatacggttgaaaacctcatcatccttgcgaacaactctctctcatctaatggaaacgttacagagagtgggtgtaaggagtgcgaagagttggaagaaaaaaacatcaaagaatttcttcaatccttcgttcacatagtgcaaatgttcattaacacgtccactaccacacccgccccgaggccacctacgccggcaccgactatcgccagtcaacccctctctctgcgccccgaggcttgccggcctgcggctggtggggcggtccacacccggggcctggattttgcgtgcgatatatacatctgggcacctcttgccggcacctgcggagtgctgcttctctcactcgttattacgctgtactgctaa

SEQ ID NO: 247 - DNA, 2121 bp, synthetic construct
  source 1..2121: mol_type = other DNA
atggccttaccagtgaccgccttgctcctgccgctggccttgctgctccacgccgccaggccgcaggtgcagctggtgcagtctggggctgaggtgaagaagcctggggcctcagtgaaggtttcctgcaaggcatctggatacatcttcaccgactactatatgcactgggtgcgacaggcccctggacaagggcttgagtggatgggaataatcaaccctagtggtggcagcacaagctacgcacagaagttccagggcagagtcaccatgaccagggacacgtccacgagcacagtctacatggagctgagcagcctgagatctgaggacacggccgtgtattactgtgctagagactcaggatggtatgagtcctggttcgacccctggggccagggaaccctggtcaccgtctcctcaggtggaggcggttcaggcggaggtggctctggcggtggcggatcggacatccagatgacccagtctccatcctccctgtctgcatctgtaggagacagagtcaccatcacttgccgggcaagtcaggacattagggatgggttaggctggtatcagcagaaaccagggaaagcccctaagctcctgatctatgctgcatccactttgcaaagtggggtcccatcaaggttcagtggcagtggatctgggacagatttcactctcaccatcagcagtctgcaacctgaagattttgcaacttactactgtcaacagagttacgggacccctcctacgttcggccaagggaccaaggtggaaatcaaaaccacgacgccagcgccgcggccaccaacaccggcgcccaccatcgcgtcgcagcccctgtccctgcgcccagaggcgtgccggccagcggcggggggcgcagtgcacacgagggggctggacttcgcctgtgatatctacatctgggcgcccttggccgggacttgtggggtccttctcctgtcactggttatcaccctttactgccggagggaccagaggctgccccccgatgcccacaagccccctgggggaggcagtttccggacccccatccaagaggagcaggccgacgcccactccaccctggccaagatcagagtgaagttcagcaggagcgcagacgcccccgcgtaccagcagggccagaaccagctctataacgagctcaatctaggacgaagagaggagtacgatgttttggacaagagacgtggccgggaccctgagatggggggaaagccgagaaggaagaaccctcaggaaggcctgtacaatgaactgcagaaagataagatggcggaggcctacagtgagattgggatgaaaggcgagcgccggaggggcaaggggcacgatggcctttaccagggtctcagtacagccaccaaggacacctacgacgcccttcacatgcaggccctgccccctcgcggctctggcgagggaaggggttccctgcttacttgcggcgacgtcgaagagaatcccggtccgatggccctcccagtaactgccctccttttgcccctcgcactccttcttcatgccgctcgccccaactgggtcaacgtgattagcgatttgaagaaaatcgaggaccttatacagtctatgcatattgacgctacactgtatactgagagtgatgtacacccgtcctgtaaggtaacggccatgaaatgctttcttctggagctccaggtcatcagcttggagtctggggacgcaagcatccacgatacggttgaaaacctcatcatccttgcgaacaactctctctcatctaatggaaacgttacagagagtgggtgtaaggagtgcgaagagttggaagaaaaaaacatcaaagaatttcttcaatccttcgttcacatagtgcaaatgttcattaacacgtccactaccacacccgccccgaggccacctacgccggcaccgactatcgccagtcaacccctctctctgcgccccgaggcttgccggcctgcggctggtggggcggtccacacccggggcctggattttgcgtgcgatatatacatctgggcacctcttgccggcacctgcggagtgctgcttctctcactcgttattacgctgtactgctaa

SEQ ID NO: 248 - DNA, 2124 bp, synthetic construct
  source 1..2124: mol_type = other DNA
atggccttaccagtgaccgccttgctcctgccgctggccttgctgctccacgccgccaggccgcaggtgcagctggtgcagtctggggctgaggtgaagaagcctggggcctcagtgaaggtttcctgcaaggcatctggatacaccttcaccgactactatcttcactgggtgcgacaggcccctggacaagggcttgagtggatgggatggatcagcgcctacaatggtaacacaaattacgcacagaagttccagggcagagtcaccatgaccagggacacgtccacgagcacagtctacatggagctgagcagcctgagatctgaggacacggccgtgtattactgtgctagagagattgtgggtgctacagaagattggtacttcgatctctggggccgtggcaccctggtcactgtctcctcaggtggaggcggttcaggcggaggtggctctggcggtggcggatcggaaatagtgatgacgcagtctccagccaccctgtctgtgtctccaggggaaagagccaccctctcctgcagggccagtcagagtgttagcagctatttagcctggtaccagcagaaacctggccaggctcccaggctcctcatctatggtgcatccaccagggccactggtatcccagccaggttcagtggcagtgggtctgggacagagttcactctcaccatcagcagcctgcagtctgaagattttgcagtttattactgtcagcagtatgattcctcccctacgttcggccaagggaccaaggtggaaatcaaaaccacgacgccagcgccgcggccaccaacaccggcgcccaccatcgcgtcgcagcccctgtccctgcgcccagaggcgtgccggccagcggcggggggcgcagtgcacacgagggggctggacttcgcctgtgatatctacatctgggcgcccttggccgggacttgtggggtccttctcctgtcactggttatcaccctttactgccggagggaccagaggctgccccccgatgcccacaagccccctgggggaggcagtttccggacccccatccaagaggagcaggccgacgcccactccaccctggccaagatcagagtgaagttcagcaggagcgcagacgcccccgcgtaccagcagggccagaaccagctctataacgagctcaatctaggacgaagagaggagtacgatgttttggacaagagacgtggccgggaccctgagatggggggaaagccgagaaggaagaaccctcaggaaggcctgtacaatgaactgcagaaagataagatggcggaggcctacagtgagattgggatgaaaggcgagcgccggaggggcaaggggcacgatggcctttaccagggtctcagtacagccaccaaggacacctacgacgcccttcacatgcaggccctgccccctcgcggctctggcgagggaaggggttccctgcttacttgcggcgacgtcgaagagaatcccggtccgatggccctcccagtaactgccctccttttgcccctcgcactccttcttcatgccgctcgccccaactgggtcaacgtgattagcgatttgaagaaaatcgaggaccttatacagtctatgcatattgacgctacactgtatactgagagtgatgtacacccgtcctgtaaggtaacggccatgaaatgctttcttctggagctccaggtcatcagcttggagtctggggacgcaagcatccacgatacggttgaaaacctcatcatccttgcgaacaactctctctcatctaatggaaacgttacagagagtgggtgtaaggagtgcgaagagttggaagaaaaaaacatcaaagaatttcttcaatccttcgttcacatagtgcaaatgttcattaacacgtccactaccacacccgccccgaggccacctacgccggcaccgactatcgccagtcaacccctctctctgcgccccgaggcttgccggcctgcggctggtggggcggtccacacccggggcctggattttgcgtgcgatatatacatctgggcacctcttgccggcacctgcggagtgctgcttctctcactcgttattacgctgtactgctaa

SEQ ID NO: 249 - DNA, 2118 bp, synthetic construct
  source 1..2118: mol_type = other DNA
atggccttaccagtgaccgccttgctcctgccgctggccttgctgctccacgccgccaggccgcaggtgcagctggtgcagtctggggctgaggtgaagaagcctggggcctcagtgaaggtttcctgcaaggcatctggatacaccttcaccgcctactatctgcactgggtgcgacaggcccctggacaagggcttgagtggatgggaatgatcaaccccaacaatggtggcacaatttacgcacagacattccagggcagagtcaccatgaccagggacacgtccacgagcacagtctacatggagctgagcagcctgagatctgaggacacggccgtgtattactgtgctagagacctgggcggctacgtcctgtttgactactggggccaagggaccctggtcaccgtctcctcaggtggaggcggttcaggcggaggtggctctggcggtggcggatcggacatccagatgacccagtctccatcctccctgtctgcatctgtaggagacagagtcaccatcacttgccgggcaagtcagagcattagcagctatttaaattggtatcagcagaaaccagggaaagcccctaagctcctgatctatgatgcatccaacttggaaaccggggtcccatcaaggttcagtggcagtggatctgggacagatttcactctcaccatcagcagtctgcaacctgaagattttgcaacttactactgtcaacagagtcacagtgcgcctatcaccttcggccaagggacacgactggagattaaaaccacgacgccagcgccgcggccaccaacaccggcgcccaccatcgcgtcgcagcccctgtccctgcgcccagaggcgtgccggccagcggcggggggcgcagtgcacacgagggggctggacttcgcctgtgatatctacatctgggcgcccttggccgggacttgtggggtccttctcctgtcactggttatcaccctttactgccggagggaccagaggctgccccccgatgcccacaagccccctgggggaggcagtttccggacccccatccaagaggagcaggccgacgcccactccaccctggccaagatcagagtgaagttcagcaggagcgcagacgcccccgcgtaccagcagggccagaaccagctctataacgagctcaatctaggacgaagagaggagtacgatgttttggacaagagacgtggccgggaccctgagatggggggaaagccgagaaggaagaaccctcaggaaggcctgtacaatgaactgcagaaagataagatggcggaggcctacagtgagattgggatgaaaggcgagcgccggaggggcaaggggcacgatggcctttaccagggtctcagtacagccaccaaggacacctacgacgcccttcacatgcaggccctgccccctcgcggctctggcgagggaaggggttccctgcttacttgcggcgacgtcgaagagaatcccggtccgatggccctcccagtaactgccctccttttgcccctcgcactccttcttcatgccgctcgccccaactgggtcaacgtgattagcgatttgaagaaaatcgaggaccttatacagtctatgcatattgacgctacactgtatactgagagtgatgtacacccgtcctgtaaggtaacggccatgaaatgctttcttctggagctccaggtcatcagcttggagtctggggacgcaagcatccacgatacggttgaaaacctcatcatccttgcgaacaactctctctcatctaatggaaacgttacagagagtgggtgtaaggagtgcgaagagttggaagaaaaaaacatcaaagaatttcttcaatccttcgttcacatagtgcaaatgttcattaacacgtccactaccacacccgccccgaggccacctacgccggcaccgactatcgccagtcaacccctctctctgcgccccgaggcttgccggcctgcggctggtggggcggtccacacccggggcctggattttgcgtgcgatatatacatctgggcacctcttgccggcacctgcggagtgctgcttctctcactcgttattacgctgtactgctaa

SEQ ID NO: 250 - DNA, 2118 bp, synthetic construct
  source 1..2118: mol_type = other DNA
atggccttaccagtgaccgccttgctcctgccgctggccttgctgctccacgccgccaggccgcaggtgcagctggtgcagtctggggctgaggtgaagaagcctggggcctcagtgaaggtttcctgcaaggcatctggatacaccttcaccgactactatattcactgggtgcgacaggcccctggacaagggcttgagtggatgggaatgatcaaccctagaggaggtagcacaacttacgcacagtcattccagggcagagtcaccatgaccagggacacgtccacgagcacagtctacatggagctgagcagcctgagatctgaggacacggccgtgtattactgtgctagagatttaggtgactatggggactacgactactggggccaagggaccctggtcaccgtctcctcaggtggaggcggttcaggcggaggtggctctggcggtggcggatcggacatccagatgacccagtctccatcctccctgtctgcatctgtaggagacagagtcaccatcacttgccgggcaagtcagagcattagcacaaacttagcttggtatcagcagaaaccagggaaagcccctaagctcctgatctatgatgcatcctatttggaggctggggtcccatcaaggttcagtggcagtggatctgggacagatttcactctcaccatcagcagtctgcaacctgaagattttgcaacttactactgtcaacagagttacagtacccctccgacttttggccaggggaccaagctggagatcaaaaccacgacgccagcgccgcggccaccaacaccggcgcccaccatcgcgtcgcagcccctgtccctgcgcccagaggcgtgccggccagcggcggggggcgcagtgcacacgagggggctggacttcgcctgtgatatctacatctgggcgcccttggccgggacttgtggggtccttctcctgtcactggttatcaccctttactgccggagggaccagaggctgccccccgatgcccacaagccccctgggggaggcagtttccggacccccatccaagaggagcaggccgacgcccactccaccctggccaagatcagagtgaagttcagcaggagcgcagacgcccccgcgtaccagcagggccagaaccagctctataacgagctcaatctaggacgaagagaggagtacgatgttttggacaagagacgtggccgggaccctgagatggggggaaagccgagaaggaagaaccctcaggaaggcctgtacaatgaactgcagaaagataagatggcggaggcctacagtgagattgggatgaaaggcgagcgccggaggggcaaggggcacgatggcctttaccagggtctcagtacagccaccaaggacacctacgacgcccttcacatgcaggccctgccccctcgcggctctggcgagggaaggggttccctgcttacttgcggcgacgtcgaagagaatcccggtccgatggccctcccagtaactgccctccttttgcccctcgcactccttcttcatgccgctcgccccaactgggtcaacgtgattagcgatttgaagaaaatcgaggaccttatacagtctatgcatattgacgctacactgtatactgagagtgatgtacacccgtcctgtaaggtaacggccatgaaatgctttcttctggagctccaggtcatcagcttggagtctggggacgcaagcatccacgatacggttgaaaacctcatcatccttgcgaacaactctctctcatctaatggaaacgttacagagagtgggtgtaaggagtgcgaagagttggaagaaaaaaacatcaaagaatttcttcaatccttcgttcacatagtgcaaatgttcattaacacgtccactaccacacccgccccgaggccacctacgccggcaccgactatcgccagtcaacccctctctctgcgccccgaggcttgccggcctgcggctggtggggcggtccacacccggggcctggattttgcgtgcgatatatacatctgggcacctcttgccggcacctgcggagtgctgcttctctcactcgttattacgctgtactgctaa

SEQ ID NO: 251 - DNA, 2151 bp, synthetic construct
  source 1..2151: mol_type = other DNA
atggccttaccagtgaccgccttgctcctgccgctggccttgctgctccacgccgccaggccggaggtgcagctgttggagtctgggggaggcttggtacagcctggggggtccctgagactctcctgtgcagcctctggattcacctttagcaattcagatatgaattgggtccgccaggctccagggaaggggctggagtgggtctcagctattagtggtggaggtgacacactctactacgcagactccgtgaagggccggttcaccatctccagagacaattccaagaacacgctgtatctgcaaatgaacagcctgagagccgaggacacggccgtatattactgtgcgatggccagcgctttggacagtagcggtgacaatgaggcttttgatatctggggccaagggacaacagtcaccgtctcttcaggtggaggcggttcaggcggaggtggctctggcggtggcggatcggacatcgtgatgacccagtctccagactccctggctgtgtctctgggcgagagggccaccatcaactgcaagtccagccagagtgttttatattccagtaataacaagaactacttagcttggtaccagcagaaaccaggacagcctcctaagctgctcatttactgggcatctacccgggattccggggtccctgaccgattcagtggcagcgggtctgggacagatttcactctcaccatcagcagcctgcaggctgaagatgtggcagtttattactgtcagcaatattatggcttccctcccaccttcggccaagggacacgactggagattaaaaccacgacgccagcgccgcggccaccaacaccggcgcccaccatcgcgtcgcagcccctgtccctgcgcccagaggcgtgccggccagcggcggggggcgcagtgcacacgagggggctggacttcgcctgtgatatctacatctgggcgcccttggccgggacttgtggggtccttctcctgtcactggttatcaccctttactgccggagggaccagaggctgccccccgatgcccacaagccccctgggggaggcagtttccggacccccatccaagaggagcaggccgacgcccactccaccctggccaagatcagagtgaagttcagcaggagcgcagacgcccccgcgtaccagcagggccagaaccagctctataacgagctcaatctaggacgaagagaggagtacgatgttttggacaagagacgtggccgggaccctgagatggggggaaagccgagaaggaagaaccctcaggaaggcctgtacaatgaactgcagaaagataagatggcggaggcctacagtgagattgggatgaaaggcgagcgccggaggggcaaggggcacgatggcctttaccagggtctcagtacagccaccaaggacacctacgacgcccttcacatgcaggccctgccccctcgcggctctggcgagggaaggggttccctgcttacttgcggcgacgtcgaagagaatcccggtccgatggccctcccagtaactgccctccttttgcccctcgcactccttcttcatgccgctcgccccaactgggtcaacgtgattagcgatttgaagaaaatcgaggaccttatacagtctatgcatattgacgctacactgtatactgagagtgatgtacacccgtcctgtaaggtaacggccatgaaatgctttcttctggagctccaggtcatcagcttggagtctggggacgcaagcatccacgatacggttgaaaacctcatcatccttgcgaacaactctctctcatctaatggaaacgttacagagagtgggtgtaaggagtgcgaagagttggaagaaaaaaacatcaaagaatttcttcaatccttcgttcacatagtgcaaatgttcattaacacgtccactaccacacccgccccgaggccacctacgccggcaccgactatcgccagtcaacccctctctctgcgccccgaggcttgccggcctgcggctggtggggcggtccacacccggggcctggattttgcgtgcgatatatacatctgggcacctcttgccggcacctgcggagtgctgcttctctcactcgttattacgctgtactgctaa

SEQ ID NO: 252 - DNA, 2127 bp, synthetic construct
  source 1..2127: mol_type = other DNA
atggccttaccagtgaccgccttgctcctgccgctggccttgctgctccacgccgccaggccgcaggtgcagctggtgcagtctggggctgaggtgaagaagcctggggcctcagtgaaggtttcctgcaaggcatctggatacaccttcaccagctactatatgcactgggtgcgacaggcccctggacaagggcttgagtggatgggatggatcaacccaaataacggtggtacaagctacgcacagaagttccagggcagagtcaccatgaccagggacacgtccacgagcacagtctacatggagctgagcagcctgagatctgaggacacggccgtgtattactgtgctagagtggaggacgatttctggagcggccctagctttgactactggggccaagggaccctggtcaccgtctcctcaggtggaggcggttcaggcggaggtggctctggcggtggcggatcggacatccagatgacccagtctccatcctccctgtctgcatctgtaggagacagagtcaccatcacttgccaagcaagtcacgacattagcaaattcttaaattggtatcagcagaaaccagggaaagcccctaagctcctgatctatgatgcatccaatttgcaacgaggggtcccatcaaggttcagtggcagtggatctgggacagatttcactctcaccatcagcagtctgcaacctgaagattttgcaacttactactgtcaacagacctacagtttccctttcacttttggccaggggaccaagctggagatcaaaaccacgacgccagcgccgcggccaccaacaccggcgcccaccatcgcgtcgcagcccctgtccctgcgcccagaggcgtgccggccagcggcggggggcgcagtgcacacgagggggctggacttcgcctgtgatatctacatctgggcgcccttggccgggacttgtggggtccttctcctgtcactggttatcaccctttactgccggagggaccagaggctgccccccgatgcccacaagccccctgggggaggcagtttccggacccccatccaagaggagcaggccgacgcccactccaccctggccaagatcagagtgaagttcagcaggagcgcagacgcccccgcgtaccagcagggccagaaccagctctataacgagctcaatctaggacgaagagaggagtacgatgttttggacaagagacgtggccgggaccctgagatggggggaaagccgagaaggaagaaccctcaggaaggcctgtacaatgaactgcagaaagataagatggcggaggcctacagtgagattgggatgaaaggcgagcgccggaggggcaaggggcacgatggcctttaccagggtctcagtacagccaccaaggacacctacgacgcccttcacatgcaggccctgccccctcgcggctctggcgagggaaggggttccctgcttacttgcggcgacgtcgaagagaatcccggtccgatggccctcccagtaactgccctccttttgcccctcgcactccttcttcatgccgctcgccccaactgggtcaacgtgattagcgatttgaagaaaatcgaggaccttatacagtctatgcatattgacgctacactgtatactgagagtgatgtacacccgtcctgtaaggtaacggccatgaaatgctttcttctggagctccaggtcatcagcttggagtctggggacgcaagcatccacgatacggttgaaaacctcatcatccttgcgaacaactctctctcatctaatggaaacgttacagagagtgggtgtaaggagtgcgaagagttggaagaaaaaaacatcaaagaatttcttcaatccttcgttcacatagtgcaaatgttcattaacacgtccactaccacacccgccccgaggccacctacgccggcaccgactatcgccagtcaacccctctctctgcgccccgaggcttgccggcctgcggctggtggggcggtccacacccggggcctggattttgcgtgcgatatatacatctgggcacctcttgccggcacctgcggagtgctgcttctctcactcgttattacgctgtactgctaa

SEQ ID NO: 253 - DNA, 2133 bp, synthetic construct
  source 1..2133: mol_type = other DNA
atggccttaccagtgaccgccttgctcctgccgctggccttgctgctccacgccgccaggccgcaggtgcagctggtgcagtctggggctgaggtgaagaagcctgggtcctcggtgaaggtctcctgcaaggcttctggaggcaccttcaccaattatgctttcagctgggtgcgacaggcccctggacaagggcttgagtggatgggaggtatcatccctatcagcggtgccgcaaactacgcacagaagttccagggcagagtcacgattaccgcggacgaatccacgagcacagcctacatggagctgagcagcctgagatctgaggacacggccgtgtattactgtgcgagagggtccggactggacgatgcttttgatatctggggccaagggacaatggtcaccgtctcttcaggtggaggcggttcaggcggaggtggctctggcggtggcggatcggatattgtgatgactcagtctccactctccctgcccgtcacccctggagagccggcctccatctcctgcaggtctagtcagagcctcctccattcaaacgggtacaactatttggattggtacctgcagaagccagggcagtctccacagctcctgatctatgatgcctcttcccttcagtccggggtccctgacaggttcagtggcagtggatcaggcacagattttacactgaaaatcagcagagtggaggctgaggatgttggggtttattactgcatgcaagctcggcaaactcctctgaccttcggccaagggacacgactggagattaaaaccacgacgccagcgccgcggccaccaacaccggcgcccaccatcgcgtcgcagcccctgtccctgcgcccagaggcgtgccggccagcggcggggggcgcagtgcacacgagggggctggacttcgcctgtgatatctacatctgggcgcccttggccgggacttgtggggtccttctcctgtcactggttatcaccctttactgccggagggaccagaggctgccccccgatgcccacaagccccctgggggaggcagtttccggacccccatccaagaggagcaggccgacgcccactccaccctggccaagatcagagtgaagttcagcaggagcgcagacgcccccgcgtaccagcagggccagaaccagctctataacgagctcaatctaggacgaagagaggagtacgatgttttggacaagagacgtggccgggaccctgagatggggggaaagccgagaaggaagaaccctcaggaaggcctgtacaatgaactgcagaaagataagatggcggaggcctacagtgagattgggatgaaaggcgagcgccggaggggcaaggggcacgatggcctttaccagggtctcagtacagccaccaaggacacctacgacgcccttcacatgcaggccctgccccctcgcggctctggcgagggaaggggttccctgcttacttgcggcgacgtcgaagagaatcccggtccgatggccctcccagtaactgccctccttttgcccctcgcactccttcttcatgccgctcgccccaactgggtcaacgtgattagcgatttgaagaaaatcgaggaccttatacagtctatgcatattgacgctacactgtatactgagagtgatgtacacccgtcctgtaaggtaacggccatgaaatgctttcttctggagctccaggtcatcagcttggagtctggggacgcaagcatccacgatacggttgaaaacctcatcatccttgcgaacaactctctctcatctaatggaaacgttacagagagtgggtgtaaggagtgcgaagagttggaagaaaaaaacatcaaagaatttcttcaatccttcgttcacatagtgcaaatgttcattaacacgtccactaccacacccgccccgaggccacctacgccggcaccgactatcgccagtcaacccctctctctgcgccccgaggcttgccggcctgcggctggtggggcggtccacacccggggcctggattttgcgtgcgatatatacatctgggcacctcttgccggcacctgcggagtgctgcttctctcactcgttattacgctgtactgctaa

SEQ ID NO: 254 - DNA, 2163 bp, synthetic construct
  source 1..2163: mol_type = other DNA
atggccttaccagtgaccgccttgctcctgccgctggccttgctgctccacgccgccaggccgcaggtgcagctggtgcagtctggggctgaggtgaagaagcctggggcctcagtgaaggtttcctgcaaggcatctggatacaccttcaccgcgtactatatgcactgggtgcgacaggcccctggacaagggcttgagtggatgggatggatgaaccccaatagtggtaacacaggatacgcacagaagttccagggcagagtcaccatgaccagggacacgtccacgagcacagtctacatggagctgagcagcctgagatctgaggacacggccgtgtattactgtgctagagagggcagaatcgattacggggactacgacgactactactattactacggtatggacgtgtggggccaagggaccactgtcaccgtctcctcaggtggaggcggttcaggcggaggtggctctggcggtggcggatcggatattgtgatgactcagtctccactctccctgcccgtcacccctggagagccggcctccatctcctgcaggtctagtcagagcctcctgcattcaaatggttacaactatttggattggtacctgcagaagccagggcagtctccacagctcctgatctatgctgcttctaatttacagggtggggtccctgacaggttcagtggcagtggatcaggcacagattttacactgaaaatcagcagagtggaggctgaggatgttggggtttattactgcatgcaaacactagagtcccctgtaactttcggcggagggaccaaggtggagatcaaaaccacgacgccagcgccgcggccaccaacaccggcgcccaccatcgcgtcgcagcccctgtccctgcgcccagaggcgtgccggccagcggcggggggcgcagtgcacacgagggggctggacttcgcctgtgatatctacatctgggcgcccttggccgggacttgtggggtccttctcctgtcactggttatcaccctttactgccggagggaccagaggctgccccccgatgcccacaagccccctgggggaggcagtttccggacccccatccaagaggagcaggccgacgcccactccaccctggccaagatcagagtgaagttcagcaggagcgcagacgcccccgcgtaccagcagggccagaaccagctctataacgagctcaatctaggacgaagagaggagtacgatgttttggacaagagacgtggccgggaccctgagatggggggaaagccgagaaggaagaaccctcaggaaggcctgtacaatgaactgcagaaagataagatggcggaggcctacagtgagattgggatgaaaggcgagcgccggaggggcaaggggcacgatggcctttaccagggtctcagtacagccaccaaggacacctacgacgcccttcacatgcaggccctgccccctcgcggctctggcgagggaaggggttccctgcttacttgcggcgacgtcgaagagaatcccggtccgatggccctcccagtaactgccctccttttgcccctcgcactccttcttcatgccgctcgccccaactgggtcaacgtgattagcgatttgaagaaaatcgaggaccttatacagtctatgcatattgacgctacactgtatactgagagtgatgtacacccgtcctgtaaggtaacggccatgaaatgctttcttctggagctccaggtcatcagcttggagtctggggacgcaagcatccacgatacggttgaaaacctcatcatccttgcgaacaactctctctcatctaatggaaacgttacagagagtgggtgtaaggagtgcgaagagttggaagaaaaaaacatcaaagaatttcttcaatccttcgttcacatagtgcaaatgttcattaacacgtccactaccacacccgccccgaggccacctacgccggcaccgactatcgccagtcaacccctctctctgcgccccgaggcttgccggcctgcggctggtggggcggtccacacccggggcctggattttgcgtgcgatatatacatctgggcacctcttgccggcacctgcggagtgctgcttctctcactcgttattacgctgtactgctaa

SEQ ID NO: 255 - DNA, 2121 bp, synthetic construct
  source 1..2121: mol_type = other DNA
atggccttaccagtgaccgccttgctcctgccgctggccttgctgctccacgccgccaggccgcaggtgcagctggtgcagtctggggctgaggtgaagaagcctggggcctcagtgaaggtttcctgcaaggcatctggatacaccttcaccgattactatgtgcactgggtgcgacaggcccctggacaagggcttgagtggatgggaacgatcaaccctagtggtgggagcacaagctacgcacagaagttccagggcagagtcaccatgaccagggacacgtccacgagcacagtctacatggagctgagcagcctgagatctgaggacacggccgtgtattactgtgctagagaccagggactctggttcaccggttttgactactggggccaagggaccctggtcaccgtctcctcaggtggaggcggttcaggcggaggtggctctggcggtggcggatcggacatccagatgacccagtctccatcctccctgtctgcatctgtaggagacagagtcaccatcacttgccgggcaagtcagggcattagcaacaatttaaattggtatcagcagaaaccagggaaagcccctaagctcctgatctatgatgcatccaacttggaacgtggggtcccatcaaggttcagtggcagtggatctgggacagatttcactctcaccatcagcagtctgcaacctgaagattttgcaacttactactgtcaacagagttacgacggtcctatcaccttcggccaagggacacgactggagattaaaaccacgacgccagcgccgcggccaccaacaccggcgcccaccatcgcgtcgcagcccctgtccctgcgcccagaggcgtgccggccagcggcggggggcgcagtgcacacgagggggctggacttcgcctgtgatatctacatctgggcgcccttggccgggacttgtggggtccttctcctgtcactggttatcaccctttactgccggagggaccagaggctgccccccgatgcccacaagccccctgggggaggcagtttccggacccccatccaagaggagcaggccgacgcccactccaccctggccaagatcagagtgaagttcagcaggagcgcagacgcccccgcgtaccagcagggccagaaccagctctataacgagctcaatctaggacgaagagaggagtacgatgttttggacaagagacgtggccgggaccctgagatggggggaaagccgagaaggaagaaccctcaggaaggcctgtacaatgaactgcagaaagataagatggcggaggcctacagtgagattgggatgaaaggcgagcgccggaggggcaaggggcacgatggcctttaccagggtctcagtacagccaccaaggacacctacgacgcccttcacatgcaggccctgccccctcgcggctctggcgagggaaggggttccctgcttacttgcggcgacgtcgaagagaatcccggtccgatggccctcccagtaactgccctccttttgcccctcgcactccttcttcatgccgctcgccccaactgggtcaacgtgattagcgatttgaagaaaatcgaggaccttatacagtctatgcatattgacgctacactgtatactgagagtgatgtacacccgtcctgtaaggtaacggccatgaaatgctttcttctggagctccaggtcatcagcttggagtctggggacgcaagcatccacgatacggttgaaaacctcatcatccttgcgaacaactctctctcatctaatggaaacgttacagagagtgggtgtaaggagtgcgaagagttggaagaaaaaaacatcaaagaatttcttcaatccttcgttcacatagtgcaaatgttcattaacacgtccactaccacacccgccccgaggccacctacgccggcaccgactatcgccagtcaacccctctctctgcgccccgaggcttgccggcctgcggctggtggggcggtccacacccggggcctggattttgcgtgcgatatatacatctgggcacctcttgccggcacctgcggagtgctgcttctctcactcgttattacgctgtactgctaa

SEQ ID NO: 256 - DNA, 2121 bp, synthetic construct
  source 1..2121: mol_type = other DNA
atggccttaccagtgaccgccttgctcctgccgctggccttgctgctccacgccgccaggccgcaggtgcagctggtgcagtctggggctgaggtgaagaagcctggggcctcagtgaaggtttcctgcaaggcatctggatacaccttcaccgcctaccacatgcactgggtgcgacaggcccctggacaagggcttgagtggatgggaataatcaaccctggagacggtgccacagggtacgcacagaatctccagggcagagtcaccatgaccagggacacgtccacgagcacagtctacatggagctgagcagcctgagatctgaggacacggccgtgtattactgtgctggtgagggcatttccggatcagatgcttttgatatctggggccaagggacattagtcaccgtctcttcaggtggaggcggttcaggcggaggtggctctggcggtggcggatcggacatccagatgacccagtctccatcctccctgtctgcatctgtaggagacagagtcaccatcacttgccgggcaagtcagagcattagcagctggttagcttggtatcagcagaaaccagggaaagcccctaagctcctgatctatgctgcatccagtttgcaaagtggggtcccatcaaggttcagtggcagtggatctgggacagatttcactctcaccatcagcagtctgcaacctgaagattttgcaacttactactgtttgcaggactacagttatcctctcactttcggcggagggaccaaggtggagatcaaaaccacgacgccagcgccgcggccaccaacaccggcgcccaccatcgcgtcgcagcccctgtccctgcgcccagaggcgtgccggccagcggcggggggcgcagtgcacacgagggggctggacttcgcctgtgatatctacatctgggcgcccttggccgggacttgtggggtccttctcctgtcactggttatcaccctttactgccggagggaccagaggctgccccccgatgcccacaagccccctgggggaggcagtttccggacccccatccaagaggagcaggccgacgcccactccaccctggccaagatcagagtgaagttcagcaggagcgcagacgcccccgcgtaccagcagggccagaaccagctctataacgagctcaatctaggacgaagagaggagtacgatgttttggacaagagacgtggccgggaccctgagatggggggaaagccgagaaggaagaaccctcaggaaggcctgtacaatgaactgcagaaagataagatggcggaggcctacagtgagattgggatgaaaggcgagcgccggaggggcaaggggcacgatggcctttaccagggtctcagtacagccaccaaggacacctacgacgcccttcacatgcaggccctgccccctcgcggctctggcgagggaaggggttccctgcttacttgcggcgacgtcgaagagaatcccggtccgatggccctcccagtaactgccctccttttgcccctcgcactccttcttcatgccgctcgccccaactgggtcaacgtgattagcgatttgaagaaaatcgaggaccttatacagtctatgcatattgacgctacactgtatactgagagtgatgtacacccgtcctgtaaggtaacggccatgaaatgctttcttctggagctccaggtcatcagcttggagtctggggacgcaagcatccacgatacggttgaaaacctcatcatccttgcgaacaactctctctcatctaatggaaacgttacagagagtgggtgtaaggagtgcgaagagttggaagaaaaaaacatcaaagaatttcttcaatccttcgttcacatagtgcaaatgttcattaacacgtccactaccacacccgccccgaggccacctacgccggcaccgactatcgccagtcaacccctctctctgcgccccgaggcttgccggcctgcggctggtggggcggtccacacccggggcctggattttgcgtgcgatatatacatctgggcacctcttgccggcacctgcggagtgctgcttctctcactcgttattacgctgtactgctaa

SEQ ID NO: 257 - DNA, 2115 bp, synthetic construct
  source 1..2115: mol_type = other DNA
atggccttaccagtgaccgccttgctcctgccgctggccttgctgctccacgccgccaggccgcaggtgcagctggtgcagtctggggctgaggtgaagaagcctgggtcctcggtgaaggtctcctgcaaggcttctggaggcaccttcagcagctatgctatcagctgggtgcgacaggcccctggacaagggcttgagtggatgggatggatgaatcctaactctggtaacacaggttacgcacagaagttccagggcagagtcacgattaccgcggacgaatccacgagcacagcctacatggagctgagcagcctgagatctgaggacacggccgtgtattactgtgcgtggggagtcgatccgtactactttgactactggggccaagggaccctggtcaccgtctcctcaggtggaggcggttcaggcggaggtggctctggcggtggcggatcggacatccagatgacccagtctccatcctccctgtctgcatctgtaggagacagagtcaccatcacttgccgggcaagtcagagcattaacaggtggttagcgtggtatcagcagaaaccagggaaagcccctaagctcctgatctatgacgcatccaatttggagaccggggtcccatcaaggttcagtggcagtggatctgggacagatttcactctcaccatcagcagtctgcaacctgaagattttgcaacttactactgtcaacagagttacattacccctctcactttcggcggagggaccaaggtggagatcaaaaccacgacgccagcgccgcggccaccaacaccggcgcccaccatcgcgtcgcagcccctgtccctgcgcccagaggcgtgccggccagcggcggggggcgcagtgcacacgagggggctggacttcgcctgtgatatctacatctgggcgcccttggccgggacttgtggggtccttctcctgtcactggttatcaccctttactgccggagggaccagaggctgccccccgatgcccacaagccccctgggggaggcagtttccggacccccatccaagaggagcaggccgacgcccactccaccctggccaagatcagagtgaagttcagcaggagcgcagacgcccccgcgtaccagcagggccagaaccagctctataacgagctcaatctaggacgaagagaggagtacgatgttttggacaagagacgtggccgggaccctgagatggggggaaagccgagaaggaagaaccctcaggaaggcctgtacaatgaactgcagaaagataagatggcggaggcctacagtgagattgggatgaaaggcgagcgccggaggggcaaggggcacgatggcctttaccagggtctcagtacagccaccaaggacacctacgacgcccttcacatgcaggccctgccccctcgcggctctggcgagggaaggggttccctgcttacttgcggcgacgtcgaagagaatcccggtccgatggccctcccagtaactgccctccttttgcccctcgcactccttcttcatgccgctcgccccaactgggtcaacgtgattagcgatttgaagaaaatcgaggaccttatacagtctatgcatattgacgctacactgtatactgagagtgatgtacacccgtcctgtaaggtaacggccatgaaatgctttcttctggagctccaggtcatcagcttggagtctggggacgcaagcatccacgatacggttgaaaacctcatcatccttgcgaacaactctctctcatctaatggaaacgttacagagagtgggtgtaaggagtgcgaagagttggaagaaaaaaacatcaaagaatttcttcaatccttcgttcacatagtgcaaatgttcattaacacgtccactaccacacccgccccgaggccacctacgccggcaccgactatcgccagtcaacccctctctctgcgccccgaggcttgccggcctgcggctggtggggcggtccacacccggggcctggattttgcgtgcgatatatacatctgggcacctcttgccggcacctgcggagtgctgcttctctcactcgttattacgctgtactgctaa

SEQ ID NO: 258 - DNA, 2115 bp, synthetic construct
  source 1..2115: mol_type = other DNA
atggccttaccagtgaccgccttgctcctgccgctggccttgctgctccacgccgccaggccgcaggtgcagctggtgcagtctggggctgaggtgaagaagcctggggcctcagtgaaggtttcctgcaaggcatctggatacaccttcaccagctactatatgcactgggtgcgacaggcccctggacaagggcttgagtggatgggaatattcaacccctccgatggtagcacaagctacgcacagaagttccagggcagagtcaccatgaccagggacacgtccacgagcacagtctacatggagctgagcagcctgagatctgaggacacggccgtgtattactgtgctagagatgttggtgagaccacgttcgacccctggggccagggaaccctggtcaccgtctcctcaggtggaggcggttcaggcggaggtggctctggcggtggcggatcggacatccagatgacccagtctccatcctccctgtctgcatctgtaggagacagagtcaccatcacttgccaggcaagtcaggatattagcaactatttaaattggtatcagcagaaaccagggaaagcccctaagctcctgatctatgacgcatccagtttggaaagtggggtcccatcaaggttcagtggcagtggatctgggacagatttcactctcaccatcagcagtctgcaacctgaagattttgcaacttactactgtcaacagactaatagttttcctatcaccttcggccaagggacacgactggagattaaaaccacgacgccagcgccgcggccaccaacaccggcgcccaccatcgcgtcgcagcccctgtccctgcgcccagaggcgtgccggccagcggcggggggcgcagtgcacacgagggggctggacttcgcctgtgatatctacatctgggcgcccttggccgggacttgtggggtccttctcctgtcactggttatcaccctttactgccggagggaccagaggctgccccccgatgcccacaagccccctgggggaggcagtttccggacccccatccaagaggagcaggccgacgcccactccaccctggccaagatcagagtgaagttcagcaggagcgcagacgcccccgcgtaccagcagggccagaaccagctctataacgagctcaatctaggacgaagagaggagtacgatgttttggacaagagacgtggccgggaccctgagatggggggaaagccgagaaggaagaaccctcaggaaggcctgtacaatgaactgcagaaagataagatggcggaggcctacagtgagattgggatgaaaggcgagcgccggaggggcaaggggcacgatggcctttaccagggtctcagtacagccaccaaggacacctacgacgcccttcacatgcaggccctgccccctcgcggctctggcgagggaaggggttccctgcttacttgcggcgacgtcgaagagaatcccggtccgatggccctcccagtaactgccctccttttgcccctcgcactccttcttcatgccgctcgccccaactgggtcaacgtgattagcgatttgaagaaaatcgaggaccttatacagtctatgcatattgacgctacactgtatactgagagtgatgtacacccgtcctgtaaggtaacggccatgaaatgctttcttctggagctccaggtcatcagcttggagtctggggacgcaagcatccacgatacggttgaaaacctcatcatccttgcgaacaactctctctcatctaatggaaacgttacagagagtgggtgtaaggagtgcgaagagttggaagaaaaaaacatcaaagaatttcttcaatccttcgttcacatagtgcaaatgttcattaacacgtccactaccacacccgccccgaggccacctacgccggcaccgactatcgccagtcaacccctctctctgcgccccgaggcttgccggcctgcggctggtggggcggtccacacccggggcctggattttgcgtgcgatatatacatctgggcacctcttgccggcacctgcggagtgctgcttctctcactcgttattacgctgtactgctaa

SEQ ID NO: 259 - DNA, 2130 bp, synthetic construct
  source 1..2130: mol_type = other DNA
atggccttaccagtgaccgccttgctcctgccgctggccttgctgctccacgccgccaggccgcaggtgcagctcgttcaaagcggcgccgaggtcaagaaaccaggcgctagcgttaaagttagttgtaaagcctccggctatactttcacatcttacggcatttcttgggtacggcaggcaccggggcagggtttggaatggatggggtggatttccgcctataacggccacacaaattacgcgcagaaattccaggggcgcgttacgatgacacgcgatacctctacctctaccgtttatatggaacttagtagtcttcgttcggaggataccgctgtctactattgcgcacgtgacagtgtacggggttgggactactactacggcatgggggtctggggccaagggaccactgtcaccgtctcctcaggtggaggcggttcaggcggaggtggctctggcggtggcggatcggacatccagatgacccagtctccatcctccctgtctgcatctgtaggagacagagtcaccatcacttgccaggcaagtcaggacattagaaacttcttaaattggtatcagcagaaaccagggaaagcccctaagctcctgatctatgctgcatccacgttgcaaagtggggtcccatcaaggttcagtggcagtggatctgggacagatttcactctcaccatcagcagtctgcaacctgaagattttgcaacttactactgtcaacagagttacagtgcccctagcacttttggccaggggaccaagctggagatcaaaaccacgacgccagcgccgcggccaccaacaccggcgcccaccatcgcgtcgcagcccctgtccctgcgcccagaggcgtgccggccagcggcggggggcgcagtgcacacgagggggctggacttcgcctgtgatatctacatctgggcgcccttggccgggacttgtggggtccttctcctgtcactggttatcaccctttactgccggagggaccagaggctgccccccgatgcccacaagccccctgggggaggcagtttccggacccccatccaagaggagcaggccgacgcccactccaccctggccaagatcagagtgaagttcagcaggagcgcagacgcccccgcgtaccagcagggccagaaccagctctataacgagctcaatctaggacgaagagaggagtacgatgttttggacaagagacgtggccgggaccctgagatggggggaaagccgagaaggaagaaccctcaggaaggcctgtacaatgaactgcagaaagataagatggcggaggcctacagtgagattgggatgaaaggcgagcgccggaggggcaaggggcacgatggcctttaccagggtctcagtacagccaccaaggacacctacgacgcccttcacatgcaggccctgccccctcgcggctctggcgagggaaggggttccctgcttacttgcggcgacgtcgaagagaatcccggtccgatggccctcccagtaactgccctccttttgcccctcgcactccttcttcatgccgctcgccccaactgggtcaacgtgattagcgatttgaagaaaatcgaggaccttatacagtctatgcatattgacgctacactgtatactgagagtgatgtacacccgtcctgtaaggtaacggccatgaaatgctttcttctggagctccaggtcatcagcttggagtctggggacgcaagcatccacgatacggttgaaaacctcatcatccttgcgaacaactctctctcatctaatggaaacgttacagagagtgggtgtaaggagtgcgaagagttggaagaaaaaaacatcaaagaatttcttcaatccttcgttcacatagtgcaaatgttcattaacacgtccactaccacacccgccccgaggccacctacgccggcaccgactatcgccagtcaacccctctctctgcgccccgaggcttgccggcctgcggctggtggggcggtccacacccggggcctggattttgcgtgcgatatatacatctgggcacctcttgccggcacctgcggagtgctgcttctctcactcgttattacgctgtactgctaa

SEQ ID NO: 260 - DNA, 2121 bp, synthetic construct
  source 1..2121: mol_type = other DNA
atggccttaccagtgaccgccttgctcctgccgctggccttgctgctccacgccgccaggccgcaggtgcagctggtgcagtctggggctgaggtgaagaagcctgggtcttcagtgaaggtttcctgcaaggcatctggatacaccttcatcgactactatatgcactgggtgcgacaggcccctggacaagggcttgagtggatgggatggatgaaccctcacagtggtaacagtgataatgcaccgaagttccagggcagagtcaccatcaccgcagacgagtccacgagcacagcatacatggagctgagcagcctgagatctgaggacacggccgtgtattactgtgctagaggttactccggatacgatctgacggctgactactggggccaagggaccctggtcaccgtctcctcaggtggaggcggttcaggcggaggtggctctggcggtggcggatcggacatccagatgacccagtctccatcctccctgtctgcatctgtaggagacagagtcaccatcacttgccgggcaagtcagagcattagcaattatttaaattggtatcagcagaaaccagggaaagcccctaagctcctgatctatgacgcatccaacttggagaccggggtcccatcaaggttcagtggcagtggatctgggacagatttcactctcaccatcagcagtctgcaacctgaagattttgcaacttactactgtcaacagagttacagtacccctatcaccttcggccaagggacacgactggagattaaaaccacgacgccagcgccgcggccaccaacaccggcgcccaccatcgcgtcgcagcccctgtccctgcgcccagaggcgtgccggccagcggcggggggcgcagtgcacacgagggggctggacttcgcctgtgatatctacatctgggcgcccttggccgggacttgtggggtccttctcctgtcactggttatcaccctttactgccggagggaccagaggctgccccccgatgcccacaagccccctgggggaggcagtttccggacccccatccaagaggagcaggccgacgcccactccaccctggccaagatcagagtgaagttcagcaggagcgcagacgcccccgcgtaccagcagggccagaaccagctctataacgagctcaatctaggacgaagagaggagtacgatgttttggacaagagacgtggccgggaccctgagatggggggaaagccgagaaggaagaaccctcaggaaggcctgtacaatgaactgcagaaagataagatggcggaggcctacagtgagattgggatgaaaggcgagcgccggaggggcaaggggcacgatggcctttaccagggtctcagtacagccaccaaggacacctacgacgcccttcacatgcaggccctgccccctcgcggctctggcgagggaaggggttccctgcttacttgcggcgacgtcgaagagaatcccggtccgatggccctcccagtaactgccctccttttgcccctcgcactccttcttcatgccgctcgccccaactgggtcaacgtgattagcgatttgaagaaaatcgaggaccttatacagtctatgcatattgacgctacactgtatactgagagtgatgtacacccgtcctgtaaggtaacggccatgaaatgctttcttctggagctccaggtcatcagcttggagtctggggacgcaagcatccacgatacggttgaaaacctcatcatccttgcgaacaactctctctcatctaatggaaacgttacagagagtgggtgtaaggagtgcgaagagttggaagaaaaaaacatcaaagaatttcttcaatccttcgttcacatagtgcaaatgttcattaacacgtccactaccacacccgccccgaggccacctacgccggcaccgactatcgccagtcaacccctctctctgcgccccgaggcttgccggcctgcggctggtggggcggtccacacccggggcctggattttgcgtgcgatatatacatctgggcacctcttgccggcacctgcggagtgctgcttctctcactcgttattacgctgtactgctaa

SEQ ID NO: 261 - DNA, 2148 bp, synthetic construct
  source 1..2148: mol_type = other DNA
atggccttaccagtgaccgccttgctcctgccgctggccttgctgctccacgccgccaggccgcaggtgcagctggtgcagtctggggctgaggtgaagaagcctggggcctcagtgaaggtctcctgcaaggcttctggatacaccttcaccggccagtatatgcactgggtgcgacaggcccctggacaagggcttgagtggatgggatggatcaacccgaacactggtgacacaaactatgcacagaagtttcagggcagggtcaccatgaccagggacacgtccaccagcacagtatacatggagctgagcagcctgagatctgaagacacggccgtgtattactgtgcgagagacagcgttttcgaggttgaagggggtactgattattattattactacggtatggatgtctggggccaagggacaatggtcaccgtctcttcaggtggaggcggttcaggcggaggtggctctggcggtggcggatcggacatccagatgacccagtctccatcctccctgtctgcatctgtaggagacagagtcaccatcacttgccgggcaagtgaaaccattagcggctggttagcctggtatcagcagaaaccagggaaagcccctaagctcctgatctatgacgcatccaacttggagactggggtcccatcaaggttcagtggcagtggatctgggacagatttcactctcaccatcagcagtctgcaacctgaagattttgcaacttactactgtcaacagagttacagtaccccttggacgttcggccaagggaccaagctggaaatcaaaaccacgacgccagcgccgcggccaccaacaccggcgcccaccatcgcgtcgcagcccctgtccctgcgcccagaggcgtgccggccagcggcggggggcgcagtgcacacgagggggctggacttcgcctgtgatatctacatctgggcgcccttggccgggacttgtggggtccttctcctgtcactggttatcaccctttactgccggagggaccagaggctgccccccgatgcccacaagccccctgggggaggcagtttccggacccccatccaagaggagcaggccgacgcccactccaccctggccaagatcagagtgaagttcagcaggagcgcagacgcccccgcgtaccagcagggccagaaccagctctataacgagctcaatctaggacgaagagaggagtacgatgttttggacaagagacgtggccgggaccctgagatggggggaaagccgagaaggaagaaccctcaggaaggcctgtacaatgaactgcagaaagataagatggcggaggcctacagtgagattgggatgaaaggcgagcgccggaggggcaaggggcacgatggcctttaccagggtctcagtacagccaccaaggacacctacgacgcccttcacatgcaggccctgccccctcgcggctctggcgagggaaggggttccctgcttacttgcggcgacgtcgaagagaatcccggtccgatggccctcccagtaactgccctccttttgcccctcgcactccttcttcatgccgctcgccccaactgggtcaacgtgattagcgatttgaagaaaatcgaggaccttatacagtctatgcatattgacgctacactgtatactgagagtgatgtacacccgtcctgtaaggtaacggccatgaaatgctttcttctggagctccaggtcatcagcttggagtctggggacgcaagcatccacgatacggttgaaaacctcatcatccttgcgaacaactctctctcatctaatggaaacgttacagagagtgggtgtaaggagtgcgaagagttggaagaaaaaaacatcaaagaatttcttcaatccttcgttcacatagtgcaaatgttcattaacacgtccactaccacacccgccccgaggccacctacgccggcaccgactatcgccagtcaacccctctctctgcgccccgaggcttgccggcctgcggctggtggggcggtccacacccggggcctggattttgcgtgcgatatatacatctgggcacctcttgccggcacctgcggagtgctgcttctctcactcgttattacgctgtactgctaa

SEQ ID NO: 262 - DNA, 2118 bp, synthetic construct
  source 1..2118: mol_type = other DNA
atggccttaccagtgaccgccttgctcctgccgctggccttgctgctccacgccgccaggccgcaggtgcagctggtgcagtctggggctgaggtgaagaagcctggggcctcagtgaaggtttcctgcaaggcatctggatacaccttcaccagctacgacattaattgggtgcgacaggcccctggacaagggcttgagtggatgggagtgatcaaccctagtggtggaggtacaagctacgcacagaagttccagggcagagtcaccatgaccagggacacgtccacgagcacagtctacatggagctgagcagcctgagatctgaggacacggccgtgtattactgtgctagatattctggctatgattgggtgtttgactactggggccaagggaccctggtcaccgtctcctcaggtggaggcggttcaggcggaggtggctctggcggtggcggatcggacatccagatgacccagtctccatcctccctgtctgcatctgtaggagacagagtcaccatcacttgccgggcaagtcagggcattggcagctggttagcttggtatcagcagaaaccagggaaagcccctaagctcctgatctatgctgcatccacattgcaaagtggggtcccatcaaggttcagtggcagtggatctgggacagatttcactctcaccatcagcagtctgcaacctgaagattttgcaacttactactgtcaacagagttacagtaccccttggactttcggccctgggaccaaagtggatatcaaaaccacgacgccagcgccgcggccaccaacaccggcgcccaccatcgcgtcgcagcccctgtccctgcgcccagaggcgtgccggccagcggcggggggcgcagtgcacacgagggggctggacttcgcctgtgatatctacatctgggcgcccttggccgggacttgtggggtccttctcctgtcactggttatcaccctttactgccggagggaccagaggctgccccccgatgcccacaagccccctgggggaggcagtttccggacccccatccaagaggagcaggccgacgcccactccaccctggccaagatcagagtgaagttcagcaggagcgcagacgcccccgcgtaccagcagggccagaaccagctctataacgagctcaatctaggacgaagagaggagtacgatgttttggacaagagacgtggccgggaccctgagatggggggaaagccgagaaggaagaaccctcaggaaggcctgtacaatgaactgcagaaagataagatggcggaggcctacagtgagattgggatgaaaggcgagcgccggaggggcaaggggcacgatggcctttaccagggtctcagtacagccaccaaggacacctacgacgcccttcacatgcaggccctgccccctcgcggctctggcgagggaaggggttccctgcttacttgcggcgacgtcgaagagaatcccggtccgatggccctcccagtaactgccctccttttgcccctcgcactccttcttcatgccgctcgccccaactgggtcaacgtgattagcgatttgaagaaaatcgaggaccttatacagtctatgcatattgacgctacactgtatactgagagtgatgtacacccgtcctgtaaggtaacggccatgaaatgctttcttctggagctccaggtcatcagcttggagtctggggacgcaagcatccacgatacggttgaaaacctcatcatccttgcgaacaactctctctcatctaatggaaacgttacagagagtgggtgtaaggagtgcgaagagttggaagaaaaaaacatcaaagaatttcttcaatccttcgttcacatagtgcaaatgttcattaacacgtccactaccacacccgccccgaggccacctacgccggcaccgactatcgccagtcaacccctctctctgcgccccgaggcttgccggcctgcggctggtggggcggtccacacccggggcctggattttgcgtgcgatatatacatctgggcacctcttgccggcacctgcggagtgctgcttctctcactcgttattacgctgtactgctaa

SEQ ID NO: 263 - DNA, 2121 bp, synthetic construct
  source 1..2121: mol_type = other DNA
atggccttaccagtgaccgccttgctcctgccgctggccttgctgctccacgccgccaggccgcaggtgcagctggtgcagtctggggctgaggtgaagaagcctggggcctcagtgaaggtttcctgcaaggcatctggatacaccttcgctaactactatatgcactgggtgcgacaggcccctggacaagggcttgagtggatgggaataatcaaccctagtggtggtagcacaagctacgcacagaagttccagggcagagtcaccatgaccagggacacgtccacgagcacagtctacatggagctgagcagcctgagatctgaggacacggccgtgtattactgtgctagagatagcggctcctactttggttggttcgacccctggggccagggaaccctggtcaccgtctcctcaggtggaggcggttcaggcggaggtggctctggcggtggcggatcggacatccagatgacccagtctccatcctccctgtctgcatctgtaggagacagagtcaccatcacttgccgggcaagtcagagcattagcagctctttagcatggtatcagcagaaaccagggaaagcccctaagctcctgatctatgatgcatccagtttgcaaagtggggtcccatcaaggttcagtggcagtggatctgggacagatttcactctcaccatcagcagtctgcaacctgaagattttgcaacttactactgtcaacagagttacaacacccctcccactttcggcggagggaccaagctggagatcaaaaccacgacgccagcgccgcggccaccaacaccggcgcccaccatcgcgtcgcagcccctgtccctgcgcccagaggcgtgccggccagcggcggggggcgcagtgcacacgagggggctggacttcgcctgtgatatctacatctgggcgcccttggccgggacttgtggggtccttctcctgtcactggttatcaccctttactgccggagggaccagaggctgccccccgatgcccacaagccccctgggggaggcagtttccggacccccatccaagaggagcaggccgacgcccactccaccctggccaagatcagagtgaagttcagcaggagcgcagacgcccccgcgtaccagcagggccagaaccagctctataacgagctcaatctaggacgaagagaggagtacgatgttttggacaagagacgtggccgggaccctgagatggggggaaagccgagaaggaagaaccctcaggaaggcctgtacaatgaactgcagaaagataagatggcggaggcctacagtgagattgggatgaaaggcgagcgccggaggggcaaggggcacgatggcctttaccagggtctcagtacagccaccaaggacacctacgacgcccttcacatgcaggccctgccccctcgcggctctggcgagggaaggggttccctgcttacttgcggcgacgtcgaagagaatcccggtccgatggccctcccagtaactgccctccttttgcccctcgcactccttcttcatgccgctcgccccaactgggtcaacgtgattagcgatttgaagaaaatcgaggaccttatacagtctatgcatattgacgctacactgtatactgagagtgatgtacacccgtcctgtaaggtaacggccatgaaatgctttcttctggagctccaggtcatcagcttggagtctggggacgcaagcatccacgatacggttgaaaacctcatcatccttgcgaacaactctctctcatctaatggaaacgttacagagagtgggtgtaaggagtgcgaagagttggaagaaaaaaacatcaaagaatttcttcaatccttcgttcacatagtgcaaatgttcattaacacgtccactaccacacccgccccgaggccacctacgccggcaccgactatcgccagtcaacccctctctctgcgccccgaggcttgccggcctgcggctggtggggcggtccacacccggggcctggattttgcgtgcgatatatacatctgggcacctcttgccggcacctgcggagtgctgcttctctcactcgttattacgctgtactgctaa

SEQ ID NO: 264 - DNA, 2121 bp, synthetic construct
  source 1..2121: mol_type = other DNA
atggccttaccagtgaccgccttgctcctgccgctggccttgctgctccacgccgccaggccgcaggtgcagctggtgcagtctggggctgaggtgaagaagcctggggcctcagtgaaggtttcctgcaaggcatctggatacaccttcaccacatactatatgcactgggtgcgacaggcccctggacaagggcttgagtggatgggaataatcaaccctaccggcggtagcacatactacgcacagaagttccagggcagagtcaccatgaccagggacacgtccacgagcacagtctacatggagctgagcagcctgagatctgaggacacggccgtgtattactgtgctagagacagcgggaactatcaagggatctttgactactggggccaagggaccctggtcaccgtctcctcaggtggaggcggttcaggcggaggtggctctggcggtggcggatcggacatccagatgacccagtctccatcctccctgtctgcatctgtaggagacagagtcaccatcacttgccgggcaagtcaggggattggcggctatttagcctggtatcagcagaaaccagggaaagcccctaagctcctgatctatgatgcatccaatttggagaccggggtcccatcaaggttcagtggcagtggatctgggacagatttcactctcaccatcagcagtctgcaacctgaagattttgcaacttactactgtcaacagagttacgactcccctcccaccttcggccaagggacacgactggagattaaaaccacgacgccagcgccgcggccaccaacaccggcgcccaccatcgcgtcgcagcccctgtccctgcgcccagaggcgtgccggccagcggcggggggcgcagtgcacacgagggggctggacttcgcctgtgatatctacatctgggcgcccttggccgggacttgtggggtccttctcctgtcactggttatcaccctttactgccggagggaccagaggctgccccccgatgcccacaagccccctgggggaggcagtttccggacccccatccaagaggagcaggccgacgcccactccaccctggccaagatcagagtgaagttcagcaggagcgcagacgcccccgcgtaccagcagggccagaaccagctctataacgagctcaatctaggacgaagagaggagtacgatgttttggacaagagacgtggccgggaccctgagatggggggaaagccgagaaggaagaaccctcaggaaggcctgtacaatgaactgcagaaagataagatggcggaggcctacagtgagattgggatgaaaggcgagcgccggaggggcaaggggcacgatggcctttaccagggtctcagtacagccaccaaggacacctacgacgcccttcacatgcaggccctgccccctcgcggctctggcgagggaaggggttccctgcttacttgcggcgacgtcgaagagaatcccggtccgatggccctcccagtaactgccctccttttgcccctcgcactccttcttcatgccgctcgccccaactgggtcaacgtgattagcgatttgaagaaaatcgaggaccttatacagtctatgcatattgacgctacactgtatactgagagtgatgtacacccgtcctgtaaggtaacggccatgaaatgctttcttctggagctccaggtcatcagcttggagtctggggacgcaagcatccacgatacggttgaaaacctcatcatccttgcgaacaactctctctcatctaatggaaacgttacagagagtgggtgtaaggagtgcgaagagttggaagaaaaaaacatcaaagaatttcttcaatccttcgttcacatagtgcaaatgttcattaacacgtccactaccacacccgccccgaggccacctacgccggcaccgactatcgccagtcaacccctctctctgcgccccgaggcttgccggcctgcggctggtggggcggtccacacccggggcctggattttgcgtgcgatatatacatctgggcacctcttgccggcacctgcggagtgctgcttctctcactcgttattacgctgtactgctaa

SEQ ID NO: 265 - DNA, 2118 bp, synthetic construct
  source 1..2118: mol_type = other DNA
atggccttaccagtgaccgccttgctcctgccgctggccttgctgctccacgccgccaggccgcaggtgcagctggtgcagtctggggctgaggtgaagaagcctggggcctcagtgaaggtttcctgcaaggcatctggaaataccttcaccagctactatatgcactgggtgcgacaggcccctggacaagggcttgagtggatgggatggatcaaccccaacagtggtgacacaaattacgcacagaacttccagggcagagtcaccatgaccagggacacgtccacgagcacagtctacatggagctgagcagcctgagatctgaggacacggccgtgtattactgtgctagaggtgtcagcggttacgatctatttgactactggggccaagggaccctggtcaccgtctcctcaggtggaggcggttcaggcggaggtggctctggcggtggcggatcggacatccagatgacccagtctccatcctccctgtctgcatctgtaggagacagagtcaccatcacttgccgggcaagtcagagcgtgagcagctatttaaattggtatcagcagaaaccagggaaagcccctaagctcctgatctatgatacgtccaacttggagacgggggtcccatcaaggttcagtggcagtggatctgggacagatttcactctcaccatcagcagtctgcaacctgaagattttgcaacttactactgtcaacaggctcatagttttcctctcactttcggcggagggaccaaggtggagatcaaaaccacgacgccagcgccgcggccaccaacaccggcgcccaccatcgcgtcgcagcccctgtccctgcgcccagaggcgtgccggccagcggcggggggcgcagtgcacacgagggggctggacttcgcctgtgatatctacatctgggcgcccttggccgggacttgtggggtccttctcctgtcactggttatcaccctttactgccggagggaccagaggctgccccccgatgcccacaagccccctgggggaggcagtttccggacccccatccaagaggagcaggccgacgcccactccaccctggccaagatcagagtgaagttcagcaggagcgcagacgcccccgcgtaccagcagggccagaaccagctctataacgagctcaatctaggacgaagagaggagtacgatgttttggacaagagacgtggccgggaccctgagatggggggaaagccgagaaggaagaaccctcaggaaggcctgtacaatgaactgcagaaagataagatggcggaggcctacagtgagattgggatgaaaggcgagcgccggaggggcaaggggcacgatggcctttaccagggtctcagtacagccaccaaggacacctacgacgcccttcacatgcaggccctgccccctcgcggctctggcgagggaaggggttccctgcttacttgcggcgacgtcgaagagaatcccggtccgatggccctcccagtaactgccctccttttgcccctcgcactccttcttcatgccgctcgccccaactgggtcaacgtgattagcgatttgaagaaaatcgaggaccttatacagtctatgcatattgacgctacactgtatactgagagtgatgtacacccgtcctgtaaggtaacggccatgaaatgctttcttctggagctccaggtcatcagcttggagtctggggacgcaagcatccacgatacggttgaaaacctcatcatccttgcgaacaactctctctcatctaatggaaacgttacagagagtgggtgtaaggagtgcgaagagttggaagaaaaaaacatcaaagaatttcttcaatccttcgttcacatagtgcaaatgttcattaacacgtccactaccacacccgccccgaggccacctacgccggcaccgactatcgccagtcaacccctctctctgcgccccgaggcttgccggcctgcggctggtggggcggtccacacccggggcctggattttgcgtgcgatatatacatctgggcacctcttgccggcacctgcggagtgctgcttctctcactcgttattacgctgtactgctaa

SEQ ID NO: 266 - DNA, 2118 bp, synthetic construct
  source 1..2118: mol_type = other DNA
atggccttaccagtgaccgccttgctcctgccgctggccttgctgctccacgccgccaggccggaggtgcagctggtggagtctgggggaggcttggtcaagcctggggggtccctgagactctcctgtgcagcgtctggattcaccttcagtagctatggcatgcactgggtccgccaggctccaggcaaggggctggagtgggtggcatcgataaaacatgatggaagtgagcaatactatgttgactccgtgaagggccgattcaccatctccagagacgattccaagaacacgctgtatctgcaaatgaacagcctgaaaacggaggacacggctgtgtattactgtgcggctagtggagtggatgtctggggccaagggacaaccgtcaccgtctcttcaggtggaggcggttcaggcggaggtggctctggcggtggcggatcggatattgtgatgactcagtctccactctccctgcccgtcacccctggagagccggcctccatctcctgcaggtctagtcagagcctcctgcacagcaatggctacaactatttggattggtacctgcagaagccagggcagtctccacagctcctgatctatttgggttctacccgggcctccggggtccctgacaggttcagtggcagtggatcaggcacagattttacactgaaaatcagcagagtggaggctgaggatgttggggtttattactgcatgcaagctctagatactcctctcactttcggcggagggaccaagttagagatcaaaaccacgacgccagcgccgcggccaccaacaccggcgcccaccatcgcgtcgcagcccctgtccctgcgcccagaggcgtgccggccagcggcggggggcgcagtgcacacgagggggctggacttcgcctgtgatatctacatctgggcgcccttggccgggacttgtggggtccttctcctgtcactggttatcaccctttactgccggagggaccagaggctgccccccgatgcccacaagccccctgggggaggcagtttccggacccccatccaagaggagcaggccgacgcccactccaccctggccaagatcagagtgaagttcagcaggagcgcagacgcccccgcgtaccagcagggccagaaccagctctataacgagctcaatctaggacgaagagaggagtacgatgttttggacaagagacgtggccgggaccctgagatggggggaaagccgagaaggaagaaccctcaggaaggcctgtacaatgaactgcagaaagataagatggcggaggcctacagtgagattgggatgaaaggcgagcgccggaggggcaaggggcacgatggcctttaccagggtctcagtacagccaccaaggacacctacgacgcccttcacatgcaggccctgccccctcgcggctctggcgagggaaggggttccctgcttacttgcggcgacgtcgaagagaatcccggtccgatggccctcccagtaactgccctccttttgcccctcgcactccttcttcatgccgctcgccccaactgggtcaacgtgattagcgatttgaagaaaatcgaggaccttatacagtctatgcatattgacgctacactgtatactgagagtgatgtacacccgtcctgtaaggtaacggccatgaaatgctttcttctggagctccaggtcatcagcttggagtctggggacgcaagcatccacgatacggttgaaaacctcatcatccttgcgaacaactctctctcatctaatggaaacgttacagagagtgggtgtaaggagtgcgaagagttggaagaaaaaaacatcaaagaatttcttcaatccttcgttcacatagtgcaaatgttcattaacacgtccactaccacacccgccccgaggccacctacgccggcaccgactatcgccagtcaacccctctctctgcgccccgaggcttgccggcctgcggctggtggggcggtccacacccggggcctggattttgcgtgcgatatatacatctgggcacctcttgccggcacctgcggagtgctgcttctctcactcgttattacgctgtactgctaa

SEQ ID NO: 267 - DNA, 2127 bp, synthetic construct
  source 1..2127: mol_type = other DNA
atggccttaccagtgaccgccttgctcctgccgctggccttgctgctccacgccgccaggccgcaggtgcagctggtgcagtctggggctgaggtgaagaagcctggggcctcagtgaaggtttcctgcaaggcatctggaggtaccttcagtcgttacgacattaattgggtgcgacaggcccctggacaagggcttgagtgggtgggaataatcgatcctacaggtgcgtcaacaagctacgcacagaagttccagggcagagtcaccatgaccagggacacgtccacgagcacagtctacatggagctgagcagcctgagatctgaggacacggccgtgtattactgtgctagagattacagttacgggatggattattatggcatggacgtctggggccaagggaccctggtcaccgtctcctcaggtggaggcggttcaggcggaggtggctctggcggtggcggatcggacatccagatgacccagtctccatcctccctgtctgcatctgtaggagacagagtcaccatcacttgccaggcgagtcaggacattagcaactatttaaattggtatcagcagaaaccagggaaagcccctaagctcctgatctacgatacctccaatttgcagacaggggtcccatcaaggttcagtggaagtggatctgggacagattttactcttaccatcagcagcctgcagcctgaagattttgcaacatattacctgagcacagatctgcagaccaccgctcacttcggccaagggaccaaggtggaaatcaaaaccacgacgccagcgccgcggccaccaacaccggcgcccaccatcgcgtcgcagcccctgtccctgcgcccagaggcgtgccggccagcggcggggggcgcagtgcacacgagggggctggacttcgcctgtgatatctacatctgggcgcccttggccgggacttgtggggtccttctcctgtcactggttatcaccctttactgccggagggaccagaggctgccccccgatgcccacaagccccctgggggaggcagtttccggacccccatccaagaggagcaggccgacgcccactccaccctggccaagatcagagtgaagttcagcaggagcgcagacgcccccgcgtaccagcagggccagaaccagctctataacgagctcaatctaggacgaagagaggagtacgatgttttggacaagagacgtggccgggaccctgagatggggggaaagccgagaaggaagaaccctcaggaaggcctgtacaatgaactgcagaaagataagatggcggaggcctacagtgagattgggatgaaaggcgagcgccggaggggcaaggggcacgatggcctttaccagggtctcagtacagccaccaaggacacctacgacgcccttcacatgcaggccctgccccctcgcggctctggcgagggaaggggttccctgcttacttgcggcgacgtcgaagagaatcccggtccgatggccctcccagtaactgccctccttttgcccctcgcactccttcttcatgccgctcgccccaactgggtcaacgtgattagcgatttgaagaaaatcgaggaccttatacagtctatgcatattgacgctacactgtatactgagagtgatgtacacccgtcctgtaaggtaacggccatgaaatgctttcttctggagctccaggtcatcagcttggagtctggggacgcaagcatccacgatacggttgaaaacctcatcatccttgcgaacaactctctctcatctaatggaaacgttacagagagtgggtgtaaggagtgcgaagagttggaagaaaaaaacatcaaagaatttcttcaatccttcgttcacatagtgcaaatgttcattaacacgtccactaccacacccgccccgaggccacctacgccggcaccgactatcgccagtcaacccctctctctgcgccccgaggcttgccggcctgcggctggtggggcggtccacacccggggcctggattttgcgtgcgatatatacatctgggcacctcttgccggcacctgcggagtgctgcttctctcactcgttattacgctgtactgctaa

SEQ ID NO: 268 - DNA, 2133 bp, synthetic construct
  source 1..2133: mol_type = other DNA
atggccttaccagtgaccgccttgctcctgccgctggccttgctgctccacgccgccaggccgcaggtgcagctggtgcagtctggggctgaggtgaagaagcctgggtcctcggtgaaggtctcctgcaaggcttctggatacaccttcaccagctatggaatcagctgggtgcgacaggcccctggacaagggcttgagtggatgggaggtatcatccctatctttggtacaacgaactacgcacagaagttccagggcagagtcacgattaccgcggacgaatccacgagcacagcctacatggagctgagcagcctgagatctgaggacacggccgtgtattactgtgcgagagatcatagcggcgatgggtacttcgatctctggggccgtggcaccctggtcactgtctcctcaggtggaggcggttcaggcggaggtggctctggcggtggcggatcggatattgtgatgactcagtctccactctccctgcccgtcacccctggagagccggcctccatctcctgcaggtctagtcagagcctcctgcactccaacggatacaactatttggattggtacctgcagaagccagggcagtctccacagctcctgatctatgatgcctcttcacttcagtccggggtccctgacaggttcagtggcagtggatcaggcacagattttacactgaaaatcagcagagtggaggctgaggatgttggggtttattactgcatgcaaggaacacactggcctcccacgttcggccaagggaccaaggtggaaatcaaaaccacgacgccagcgccgcggccaccaacaccggcgcccaccatcgcgtcgcagcccctgtccctgcgcccagaggcgtgccggccagcggcggggggcgcagtgcacacgagggggctggacttcgcctgtgatatctacatctgggcgcccttggccgggacttgtggggtccttctcctgtcactggttatcaccctttactgccggagggaccagaggctgccccccgatgcccacaagccccctgggggaggcagtttccggacccccatccaagaggagcaggccgacgcccactccaccctggccaagatcagagtgaagttcagcaggagcgcagacgcccccgcgtaccagcagggccagaaccagctctataacgagctcaatctaggacgaagagaggagtacgatgttttggacaagagacgtggccgggaccctgagatggggggaaagccgagaaggaagaaccctcaggaaggcctgtacaatgaactgcagaaagataagatggcggaggcctacagtgagattgggatgaaaggcgagcgccggaggggcaaggggcacgatggcctttaccagggtctcagtacagccaccaaggacacctacgacgcccttcacatgcaggccctgccccctcgcggctctggcgagggaaggggttccctgcttacttgcggcgacgtcgaagagaatcccggtccgatggccctcccagtaactgccctccttttgcccctcgcactccttcttcatgccgctcgccccaactgggtcaacgtgattagcgatttgaagaaaatcgaggaccttatacagtctatgcatattgacgctacactgtatactgagagtgatgtacacccgtcctgtaaggtaacggccatgaaatgctttcttctggagctccaggtcatcagcttggagtctggggacgcaagcatccacgatacggttgaaaacctcatcatccttgcgaacaactctctctcatctaatggaaacgttacagagagtgggtgtaaggagtgcgaagagttggaagaaaaaaacatcaaagaatttcttcaatccttcgttcacatagtgcaaatgttcattaacacgtccactaccacacccgccccgaggccacctacgccggcaccgactatcgccagtcaacccctctctctgcgccccgaggcttgccggcctgcggctggtggggcggtccacacccggggcctggattttgcgtgcgatatatacatctgggcacctcttgccggcacctgcggagtgctgcttctctcactcgttattacgctgtactgctaa

SEQ ID NO: 269 - DNA, 2115 bp, synthetic construct
  source 1..2115: mol_type = other DNA
atggccttaccagtgaccgccttgctcctgccgctggccttgctgctccacgccgccaggccgcaggtgcagctggtgcagtctggggctgaggtgaagaagcctggggcctcagtgaaggtctcctgcaaggcttctggatacaccttcaccgagaatgagatgcactgggtgcgacaggcccctggacaagggcttgagtggatgggatggatcaacccgaacagtggtggcacaaactatgcacagaagtttcagggcagggtcaccatgaccagggacacgtccactagcacagtgtacatggagctgagctctctgagatctgaagacacggccgtgtattactgtgcggggagctggggtggttactactttgactactggggccaagggaccctggtcaccgtctcctcaggtggaggcggttcaggcggaggtggctctggcggtggcggatcggacatccagatgacccagtctccatcctccctgtctgcatctgtaggagacagagtcaccatcacttgccgggcaagtcagagcgttagcagatatttaaattggtatcagcagaaaccagggaaagcccctaagctcctgatctatgatgcatccaatttggaaaccggggtcccatcaaggttcagtggcagtggatctgggacagatttcactctcaccatcagcagtctgcaacctgaagattttgcaacttactactgtcaacaggccgacagtttccctgtgacttttggccaggggaccaagctggagatcaaaaccacgacgccagcgccgcggccaccaacaccggcgcccaccatcgcgtcgcagcccctgtccctgcgcccagaggcgtgccggccagcggcggggggcgcagtgcacacgagggggctggacttcgcctgtgatatctacatctgggcgcccttggccgggacttgtggggtccttctcctgtcactggttatcaccctttactgccggagggaccagaggctgccccccgatgcccacaagccccctgggggaggcagtttccggacccccatccaagaggagcaggccgacgcccactccaccctggccaagatcagagtgaagttcagcaggagcgcagacgcccccgcgtaccagcagggccagaaccagctctataacgagctcaatctaggacgaagagaggagtacgatgttttggacaagagacgtggccgggaccctgagatggggggaaagccgagaaggaagaaccctcaggaaggcctgtacaatgaactgcagaaagataagatggcggaggcctacagtgagattgggatgaaaggcgagcgccggaggggcaaggggcacgatggcctttaccagggtctcagtacagccaccaaggacacctacgacgcccttcacatgcaggccctgccccctcgcggctctggcgagggaaggggttccctgcttacttgcggcgacgtcgaagagaatcccggtccgatggccctcccagtaactgccctccttttgcccctcgcactccttcttcatgccgctcgccccaactgggtcaacgtgattagcgatttgaagaaaatcgaggaccttatacagtctatgcatattgacgctacactgtatactgagagtgatgtacacccgtcctgtaaggtaacggccatgaaatgctttcttctggagctccaggtcatcagcttggagtctggggacgcaagcatccacgatacggttgaaaacctcatcatccttgcgaacaactctctctcatctaatggaaacgttacagagagtgggtgtaaggagtgcgaagagttggaagaaaaaaacatcaaagaatttcttcaatccttcgttcacatagtgcaaatgttcattaacacgtccactaccacacccgccccgaggccacctacgccggcaccgactatcgccagtcaacccctctctctgcgccccgaggcttgccggcctgcggctggtggggcggtccacacccggggcctggattttgcgtgcgatatatacatctgggcacctcttgccggcacctgcggagtgctgcttctctcactcgttattacgctgtactgctaa

SEQ ID NO: 270 - DNA, 2124 bp, synthetic construct
  source 1..2124: mol_type = other DNA
atggccttaccagtgaccgccttgctcctgccgctggccttgctgctccacgccgccaggccgcaggtgcagctggtgcagtctggggctgaggtgaagaagcctggggcctcagtgaaggtttcctgcaaggcatctggatacaccttcaccaactactatatctactgggtgcgacaggcccctggacaagggcttgagtggatgggatggatcaaccccaatgacggtgcaacaaattacgcacagaagttccagggcagagtcaccatgaccagggacacgtccacgagcacagtctacatggagctgagcagcctgagatctgaggacacggccgtgtattactgtgctagagaaggcaacgattactattattatttcatggactactggggccaagggaccctggtcaccgtctcctcaggtggaggcggttcaggcggaggtggctctggcggtggcggatcggacatccagatgacccagtctccatcctccctgtctgcatctgtaggagacagagtcaccatcacttgccgggcaagtcagggcattagcaacaatttaaattggtatcagcagaaaccagggaaagcccctaagctcctgatctatcatgcatccaacttggagacgggggtcccatcaaggttcagtggcagtggatctgggacagatttcactctcaccatcagcagtctgcaacctgaagattttgcaacttactactgtcaacagagttacgacggccctatgacttttggccaggggaccaagctggagatcaaaaccacgacgccagcgccgcggccaccaacaccggcgcccaccatcgcgtcgcagcccctgtccctgcgcccagaggcgtgccggccagcggcggggggcgcagtgcacacgagggggctggacttcgcctgtgatatctacatctgggcgcccttggccgggacttgtggggtccttctcctgtcactggttatcaccctttactgccggagggaccagaggctgccccccgatgcccacaagccccctgggggaggcagtttccggacccccatccaagaggagcaggccgacgcccactccaccctggccaagatcagagtgaagttcagcaggagcgcagacgcccccgcgtaccagcagggccagaaccagctctataacgagctcaatctaggacgaagagaggagtacgatgttttggacaagagacgtggccgggaccctgagatggggggaaagccgagaaggaagaaccctcaggaaggcctgtacaatgaactgcagaaagataagatggcggaggcctacagtgagattgggatgaaaggcgagcgccggaggggcaaggggcacgatggcctttaccagggtctcagtacagccaccaaggacacctacgacgcccttcacatgcaggccctgccccctcgcggctctggcgagggaaggggttccctgcttacttgcggcgacgtcgaagagaatcccggtccgatggccctcccagtaactgccctccttttgcccctcgcactccttcttcatgccgctcgccccaactgggtcaacgtgattagcgatttgaagaaaatcgaggaccttatacagtctatgcatattgacgctacactgtatactgagagtgatgtacacccgtcctgtaaggtaacggccatgaaatgctttcttctggagctccaggtcatcagcttggagtctggggacgcaagcatccacgatacggttgaaaacctcatcatccttgcgaacaactctctctcatctaatggaaacgttacagagagtgggtgtaaggagtgcgaagagttggaagaaaaaaacatcaaagaatttcttcaatccttcgttcacatagtgcaaatgttcattaacacgtccactaccacacccgccccgaggccacctacgccggcaccgactatcgccagtcaacccctctctctgcgccccgaggcttgccggcctgcggctggtggggcggtccacacccggggcctggattttgcgtgcgatatatacatctgggcacctcttgccggcacctgcggagtgctgcttctctcactcgttattacgctgtactgctaa

SEQ ID NO: 271 - DNA, 2142 bp, synthetic construct
  source 1..2142: mol_type = other DNA
atggccttaccagtgaccgccttgctcctgccgctggccttgctgctccacgccgccaggccgcaggtgcagctggtgcagtctggggctgaggtgaagaagcctgggtcctcggtgaaggtctcctgcaaggcttctggaggcaccttcagcagctatgctatcagctgggtgcgacaggcccctggacaagggcttgagtggatgggaggaatcacaccaatgtttggtacaacggactacgcacagaagttccagggcagagtcacgattaccgcggacgaatccacgagcacagcctacatggagctgagcagcctgagatctgaggacacggccgtgtattactgtgcgagagatgagcgggacggatacgccacagtggcttttgatatctggggccaagggacaatggtcaccgtctcttcaggtggaggcggttcaggcggaggtggctctggcggtggcggatcggatattgtgatgactcagtctccactctccctgcccgtcacccctggagagccggcctccatctcctgcaggtctagtcagagcctcctgcatagcaatggatacaactatttggattggtacctgcagaagccagggcagtctccacagctcctgatctatgatgcttctaatcttgagacaggggtccctgacaggttcagtggcagtggatcaggcacagattttacactgaaaatcagcagagtggaggctgaggatgttggggtttattactgcatgcaagggacgcattggcctcccacgttcggccaagggaccaaggtggaaatcaaaaccacgacgccagcgccgcggccaccaacaccggcgcccaccatcgcgtcgcagcccctgtccctgcgcccagaggcgtgccggccagcggcggggggcgcagtgcacacgagggggctggacttcgcctgtgatatctacatctgggcgcccttggccgggacttgtggggtccttctcctgtcactggttatcaccctttactgccggagggaccagaggctgccccccgatgcccacaagccccctgggggaggcagtttccggacccccatccaagaggagcaggccgacgcccactccaccctggccaagatcagagtgaagttcagcaggagcgcagacgcccccgcgtaccagcagggccagaaccagctctataacgagctcaatctaggacgaagagaggagtacgatgttttggacaagagacgtggccgggaccctgagatggggggaaagccgagaaggaagaaccctcaggaaggcctgtacaatgaactgcagaaagataagatggcggaggcctacagtgagattgggatgaaaggcgagcgccggaggggcaaggggcacgatggcctttaccagggtctcagtacagccaccaaggacacctacgacgcccttcacatgcaggccctgccccctcgcggctctggcgagggaaggggttccctgcttacttgcggcgacgtcgaagagaatcccggtccgatggccctcccagtaactgccctccttttgcccctcgcactccttcttcatgccgctcgccccaactgggtcaacgtgattagcgatttgaagaaaatcgaggaccttatacagtctatgcatattgacgctacactgtatactgagagtgatgtacacccgtcctgtaaggtaacggccatgaaatgctttcttctggagctccaggtcatcagcttggagtctggggacgcaagcatccacgatacggttgaaaacctcatcatccttgcgaacaactctctctcatctaatggaaacgttacagagagtgggtgtaaggagtgcgaagagttggaagaaaaaaacatcaaagaatttcttcaatccttcgttcacatagtgcaaatgttcattaacacgtccactaccacacccgccccgaggccacctacgccggcaccgactatcgccagtcaacccctctctctgcgccccgaggcttgccggcctgcggctggtggggcggtccacacccggggcctggattttgcgtgcgatatatacatctgggcacctcttgccggcacctgcggagtgctgcttctctcactcgttattacgctgtactgctaa

SEQ ID NO: 272 - DNA, 2127 bp, synthetic construct
  source 1..2127: mol_type = other DNA
atggccttaccagtgaccgccttgctcctgccgctggccttgctgctccacgccgccaggccgcaggtgcagctggtgcagtctggggctgaggtgaagaagcctggggcctcagtgaaggtttcctgcaaggcatctggatacaccttcaccagctactatatgcactgggtgcgacaggcccctggacaagggcttgagtggatgggaataatcaaccctagtgacggaggaacaagctacgcagacaagttccagggcagagtcaccatgaccagggacacgtccacgagcacagtctacatggagctgagcagcctgagatctgaggacacggccgtgtattactgtgctagagcgcttgcccccctgggatggggtgacggcatggatgtctggggccaagggacaacagtcaccgtctcttcaggtggaggcggttcaggcggaggtggctctggcggtggcggatcggacatccagatgacccagtctccatcctccctgtctgcatctgtaggagacagagtcaccatcacttgccaggcgagtcaggacattagcaactatttaaattggtatcagcagaaaccagggaaagcccctaagctcctgatctacgatgcatccaatttggaaacaggggtcccatcaaggttcagtggaagtggatctgggacagattttactctcaccatcagcagcctgcagcctgaagatttcgcaacatattactgtcaacagtcatatgatggacctatcaccttcggccaagggacacgactggagattaaaaccacgacgccagcgccgcggccaccaacaccggcgcccaccatcgcgtcgcagcccctgtccctgcgcccagaggcgtgccggccagcggcggggggcgcagtgcacacgagggggctggacttcgcctgtgatatctacatctgggcgcccttggccgggacttgtggggtccttctcctgtcactggttatcaccctttactgccggagggaccagaggctgccccccgatgcccacaagccccctgggggaggcagtttccggacccccatccaagaggagcaggccgacgcccactccaccctggccaagatcagagtgaagttcagcaggagcgcagacgcccccgcgtaccagcagggccagaaccagctctataacgagctcaatctaggacgaagagaggagtacgatgttttggacaagagacgtggccgggaccctgagatggggggaaagccgagaaggaagaaccctcaggaaggcctgtacaatgaactgcagaaagataagatggcggaggcctacagtgagattgggatgaaaggcgagcgccggaggggcaaggggcacgatggcctttaccagggtctcagtacagccaccaaggacacctacgacgcccttcacatgcaggccctgccccctcgcggctctggcgagggaaggggttccctgcttacttgcggcgacgtcgaagagaatcccggtccgatggccctcccagtaactgccctccttttgcccctcgcactccttcttcatgccgctcgccccaactgggtcaacgtgattagcgatttgaagaaaatcgaggaccttatacagtctatgcatattgacgctacactgtatactgagagtgatgtacacccgtcctgtaaggtaacggccatgaaatgctttcttctggagctccaggtcatcagcttggagtctggggacgcaagcatccacgatacggttgaaaacctcatcatccttgcgaacaactctctctcatctaatggaaacgttacagagagtgggtgtaaggagtgcgaagagttggaagaaaaaaacatcaaagaatttcttcaatccttcgttcacatagtgcaaatgttcattaacacgtccactaccacacccgccccgaggccacctacgccggcaccgactatcgccagtcaacccctctctctgcgccccgaggcttgccggcctgcggctggtggggcggtccacacccggggcctggattttgcgtgcgatatatacatctgggcacctcttgccggcacctgcggagtgctgcttctctcactcgttattacgctgtactgctaa

SEQ ID NO: 273 - DNA, 2118 bp, synthetic construct
  source 1..2118: mol_type = other DNA
atggccttaccagtgaccgccttgctcctgccgctggccttgctgctccacgccgccaggccgcaggtgcagctggtgcagtctggggctgaggtgaagaagcctgggtcctcggtgaaggtctcctgcaaggcttctggatacaccttcactagctattacatccactgggtgcgacaggcccctggacaagggcttgagtggatgggatggatgaatccctcctcaggtgttacgaacttcgcacagaagttccagggcagagtcacgattaccgcggacgaatccacgagcacagcctacatggagctgagcagcctgagatctgaggacacggccgtgtattactgtgcgagaggttcggaccagggtgactggtctgacccctggggccagggaaccctggtcaccgtctcctcaggtggaggcggttcaggcggaggtggctctggcggtggcggatcggacatccagatgacccagtctccatcctccctgtctgcatctgtaggagacagagtcaccatcacttgccgggcaagtcagagcattagcagctatttaaattggtatcagcagaaaccagggaaagcccctaagctcctgatctatgacgcatccaacttggaaacgggggtcccatcaaggttcagtggcagtggatctgggacagatttcactctcaccatcagcagtctgcaacctgaagattttgcaacttactactgtcaacagagttacaatacccctccaactttcggcggagggaccaaggtggagatcaaaaccacgacgccagcgccgcggccaccaacaccggcgcccaccatcgcgtcgcagcccctgtccctgcgcccagaggcgtgccggccagcggcggggggcgcagtgcacacgagggggctggacttcgcctgtgatatctacatctgggcgcccttggccgggacttgtggggtccttctcctgtcactggttatcaccctttactgccggagggaccagaggctgccccccgatgcccacaagccccctgggggaggcagtttccggacccccatccaagaggagcaggccgacgcccactccaccctggccaagatcagagtgaagttcagcaggagcgcagacgcccccgcgtaccagcagggccagaaccagctctataacgagctcaatctaggacgaagagaggagtacgatgttttggacaagagacgtggccgggaccctgagatggggggaaagccgagaaggaagaaccctcaggaaggcctgtacaatgaactgcagaaagataagatggcggaggcctacagtgagattgggatgaaaggcgagcgccggaggggcaaggggcacgatggcctttaccagggtctcagtacagccaccaaggacacctacgacgcccttcacatgcaggccctgccccctcgcggctctggcgagggaaggggttccctgcttacttgcggcgacgtcgaagagaatcccggtccgatggccctcccagtaactgccctccttttgcccctcgcactccttcttcatgccgctcgccccaactgggtcaacgtgattagcgatttgaagaaaatcgaggaccttatacagtctatgcatattgacgctacactgtatactgagagtgatgtacacccgtcctgtaaggtaacggccatgaaatgctttcttctggagctccaggtcatcagcttggagtctggggacgcaagcatccacgatacggttgaaaacctcatcatccttgcgaacaactctctctcatctaatggaaacgttacagagagtgggtgtaaggagtgcgaagagttggaagaaaaaaacatcaaagaatttcttcaatccttcgttcacatagtgcaaatgttcattaacacgtccactaccacacccgccccgaggccacctacgccggcaccgactatcgccagtcaacccctctctctgcgccccgaggcttgccggcctgcggctggtggggcggtccacacccggggcctggattttgcgtgcgatatatacatctgggcacctcttgccggcacctgcggagtgctgcttctctcactcgttattacgctgtactgctaa

SEQ ID NO: 274 - DNA, 2127 bp, synthetic construct
  source 1..2127: mol_type = other DNA
atggccttaccagtgaccgccttgctcctgccgctggccttgctgctccacgccgccaggccgcaggtgcagctggtgcagtctggggctgaggtgaagaagcctggggcctcagtgaaggtttcctgcaaggcatctggatacaccttcaccgactcctatatacactgggtgcgacaggcccctggacaagggcttgagtggattggatggatgaaccctaatacaggtgacacaggctacgcacagaagttccagggcagagtcaccatgaccagggacacgtccacgagcacagtctacatggagctgagcagcctgagatctgaggacacggccgtgtattactgtgctaaggacgactttggagagcttgctccagccaccttcgacccctggggccagggaaccctggtcaccgtctcctcaggtggaggcggttcaggcggaggtggctctggcggtggcggatcggacatccagatgacccagtctccatcctccctgtctgcatctgtaggagacagagtcaccatcacttgccaggcaagtcaggacattagcaattatttaaattggtatcagcagaaaccagggaaagcccctaagctcctgatctatggtgcatccagtttgcaaagtggggtcccatcaaggttcagtggcagtggatctgggacagatttcactctcaccatcagcagtctgcaacctgaagattttgcaacttactactgtctgcaggatgcggcgacccctatcaccttcggccaagggacacgactggagattaaaaccacgacgccagcgccgcggccaccaacaccggcgcccaccatcgcgtcgcagcccctgtccctgcgcccagaggcgtgccggccagcggcggggggcgcagtgcacacgagggggctggacttcgcctgtgatatctacatctgggcgcccttggccgggacttgtggggtccttctcctgtcactggttatcaccctttactgccggagggaccagaggctgccccccgatgcccacaagccccctgggggaggcagtttccggacccccatccaagaggagcaggccgacgcccactccaccctggccaagatcagagtgaagttcagcaggagcgcagacgcccccgcgtaccagcagggccagaaccagctctataacgagctcaatctaggacgaagagaggagtacgatgttttggacaagagacgtggccgggaccctgagatggggggaaagccgagaaggaagaaccctcaggaaggcctgtacaatgaactgcagaaagataagatggcggaggcctacagtgagattgggatgaaaggcgagcgccggaggggcaaggggcacgatggcctttaccagggtctcagtacagccaccaaggacacctacgacgcccttcacatgcaggccctgccccctcgcggctctggcgagggaaggggttccctgcttacttgcggcgacgtcgaagagaatcccggtccgatggccctcccagtaactgccctccttttgcccctcgcactccttcttcatgccgctcgccccaactgggtcaacgtgattagcgatttgaagaaaatcgaggaccttatacagtctatgcatattgacgctacactgtatactgagagtgatgtacacccgtcctgtaaggtaacggccatgaaatgctttcttctggagctccaggtcatcagcttggagtctggggacgcaagcatccacgatacggttgaaaacctcatcatccttgcgaacaactctctctcatctaatggaaacgttacagagagtgggtgtaaggagtgcgaagagttggaagaaaaaaacatcaaagaatttcttcaatccttcgttcacatagtgcaaatgttcattaacacgtccactaccacacccgccccgaggccacctacgccggcaccgactatcgccagtcaacccctctctctgcgccccgaggcttgccggcctgcggctggtggggcggtccacacccggggcctggattttgcgtgcgatatatacatctgggcacctcttgccggcacctgcggagtgctgcttctctcactcgttattacgctgtactgctaa

SEQ ID NO: 275 - DNA, 2127 bp, synthetic construct
  source 1..2127: mol_type = other DNA
atggccttaccagtgaccgccttgctcctgccgctggccttgctgctccacgccgccaggccgcaggtgcagctggtgcagtctggggctgaggtgaagaagcctggggcctcagtgaaggtttcctgcaaggcatctggatacaccttcaccagctacgacatcaattgggtgcgacaggcccctggacaagggcttgagtggatgggagtcatcagccctagtggtggtggaacaagctacgcacagaagttccagggcagagtcaccatgaccagggacacgtccacgagcacagtctacatggagctgagcagcctgagatctgaggacacggccgtgtattactgtgctagatactacggcggcaaccccgaagggtggtacttcgatctctggggccgtggcaccctggtcactgtctcctcaggtggaggcggttcaggcggaggtggctctggcggtggcggatcggacatccagatgacccagtctccatcctccctgtctgcatctgtaggagacagagtcaccatcacttgccgggcaagtcagagcattggaaattggttagcctggtatcagcagaaaccagggaaagcccctaagctcctgatctatgacgcatccgatttggaaaccggggtcccatcaaggttcagtggcagtggatctgggacagatttcactctcaccatcagcagtctgcaacctgaagattttgcaacttactactgtcaacagagttacactaccccttggacgttcggccaagggaccaaggtggaaatcaaaaccacgacgccagcgccgcggccaccaacaccggcgcccaccatcgcgtcgcagcccctgtccctgcgcccagaggcgtgccggccagcggcggggggcgcagtgcacacgagggggctggacttcgcctgtgatatctacatctgggcgcccttggccgggacttgtggggtccttctcctgtcactggttatcaccctttactgccggagggaccagaggctgccccccgatgcccacaagccccctgggggaggcagtttccggacccccatccaagaggagcaggccgacgcccactccaccctggccaagatcagagtgaagttcagcaggagcgcagacgcccccgcgtaccagcagggccagaaccagctctataacgagctcaatctaggacgaagagaggagtacgatgttttggacaagagacgtggccgggaccctgagatggggggaaagccgagaaggaagaaccctcaggaaggcctgtacaatgaactgcagaaagataagatggcggaggcctacagtgagattgggatgaaaggcgagcgccggaggggcaaggggcacgatggcctttaccagggtctcagtacagccaccaaggacacctacgacgcccttcacatgcaggccctgccccctcgcggctctggcgagggaaggggttccctgcttacttgcggcgacgtcgaagagaatcccggtccgatggccctcccagtaactgccctccttttgcccctcgcactccttcttcatgccgctcgccccaactgggtcaacgtgattagcgatttgaagaaaatcgaggaccttatacagtctatgcatattgacgctacactgtatactgagagtgatgtacacccgtcctgtaaggtaacggccatgaaatgctttcttctggagctccaggtcatcagcttggagtctggggacgcaagcatccacgatacggttgaaaacctcatcatccttgcgaacaactctctctcatctaatggaaacgttacagagagtgggtgtaaggagtgcgaagagttggaagaaaaaaacatcaaagaatttcttcaatccttcgttcacatagtgcaaatgttcattaacacgtccactaccacacccgccccgaggccacctacgccggcaccgactatcgccagtcaacccctctctctgcgccccgaggcttgccggcctgcggctggtggggcggtccacacccggggcctggattttgcgtgcgatatatacatctgggcacctcttgccggcacctgcggagtgctgcttctctcactcgttattacgctgtactgctaa

SEQ ID NO: 276 - DNA, 2172 bp, synthetic construct
  source 1..2172: mol_type = other DNA
atggccttaccagtgaccgccttgctcctgccgctggccttgctgctccacgccgccaggccggaggtgcagctgctggagtctgggggaggcctcgtccagcctgggggctccctgagactctcctgtgcagcctctggattcgttttcgatgactatgctatccactgggtccgccaggctccgggcaaggggctagagtgggtggcagcgatatcatatgatggaagtaataaatactacgcagactccgtgaagggccgattcaccatctccagagacaattccaagaacacgctgtatctgcaaatgaacagcctgagagctgaggacacggctgtgtattactgtgcgagagctccacaatattatgggagtggcaccgacccacttgaggttagatactactactacggcatggacgtgtggggccaagggaccacggtcaccgtctcctcaggtggaggcggttcaggcggaggtggctctggcggtggcggatcggatattgtgatgactcagtctccactctccctgcccgtcacccctggagagccggcctccatctcctgcaggtctagtcagagcctcttgcattctaatggctacaactatttggattggtacctgcagaagccagggcagtctccacagctcctgatctatgaagtctctaatcgggcctccggggtccctgacaggttcagtggcagtggatcaggcacagattttacactgaaaatcagcagagtggaggctgaggatgttggggtttattactgcatgaaaggcctacaaactcctctgactttcggccctgggaccaaagtggatatcaaaaccacgacgccagcgccgcggccaccaacaccggcgcccaccatcgcgtcgcagcccctgtccctgcgcccagaggcgtgccggccagcggcggggggcgcagtgcacacgagggggctggacttcgcctgtgatatctacatctgggcgcccttggccgggacttgtggggtccttctcctgtcactggttatcaccctttactgccggagggaccagaggctgccccccgatgcccacaagccccctgggggaggcagtttccggacccccatccaagaggagcaggccgacgcccactccaccctggccaagatcagagtgaagttcagcaggagcgcagacgcccccgcgtaccagcagggccagaaccagctctataacgagctcaatctaggacgaagagaggagtacgatgttttggacaagagacgtggccgggaccctgagatggggggaaagccgagaaggaagaaccctcaggaaggcctgtacaatgaactgcagaaagataagatggcggaggcctacagtgagattgggatgaaaggcgagcgccggaggggcaaggggcacgatggcctttaccagggtctcagtacagccaccaaggacacctacgacgcccttcacatgcaggccctgccccctcgcggctctggcgagggaaggggttccctgcttacttgcggcgacgtcgaagagaatcccggtccgatggccctcccagtaactgccctccttttgcccctcgcactccttcttcatgccgctcgccccaactgggtcaacgtgattagcgatttgaagaaaatcgaggaccttatacagtctatgcatattgacgctacactgtatactgagagtgatgtacacccgtcctgtaaggtaacggccatgaaatgctttcttctggagctccaggtcatcagcttggagtctggggacgcaagcatccacgatacggttgaaaacctcatcatccttgcgaacaactctctctcatctaatggaaacgttacagagagtgggtgtaaggagtgcgaagagttggaagaaaaaaacatcaaagaatttcttcaatccttcgttcacatagtgcaaatgttcattaacacgtccactaccacacccgccccgaggccacctacgccggcaccgactatcgccagtcaacccctctctctgcgccccgaggcttgccggcctgcggctggtggggcggtccacacccggggcctggattttgcgtgcgatatatacatctgggcacctcttgccggcacctgcggagtgctgcttctctcactcgttattacgctgtactgctaa

SEQ ID NO: 277 - DNA, 2127 bp, synthetic construct
  source 1..2127: mol_type = other DNA
atggccttaccagtgaccgccttgctcctgccgctggccttgctgctccacgccgccaggccgcaggtgcagctggtgcagtctggggctgaggtgaagaagcctgggtcctcggtgaaggtctcctgcaaggcttctggaggcaccttccgcaattatgctatcagctgggtgcgacaggcccctggacaagggcttgagtggatgggaggtatcatccctatctttggtacagcaaactacgcacagaagttccagggcagagtcacgattaccgcggacgaatccacgagcacagcctacatggagctgagcagcctgagatctgaggacacggccgtgtattactgtgcgagagatcacagtgctgggactcaccacgacgcttttgatatctggggccaagggacaatggtcaccgtctcttcaggtggaggcggttcaggcggaggtggctctggcggtggcggatcggacatccagatgacccagtctccatcctccctgtctgcatctgtaggagacagagtcaccatcacttgccgggcaagtcagggcattagcaactatttagcctggtatcagcagaaaccagggaaagcccctaagctcctgatctatgctgcatccagtttgcaaagtggggtcccatcaaggttcagtggcagtggatctgggacagatttcactctcaccatcagcagtctgcaacctgaagattttgcaacttactactgtcaacagagtcacagtacccctctcactttcggccaagggaccaaggtggagatcaaaaccacgacgccagcgccgcggccaccaacaccggcgcccaccatcgcgtcgcagcccctgtccctgcgcccagaggcgtgccggccagcggcggggggcgcagtgcacacgagggggctggacttcgcctgtgatatctacatctgggcgcccttggccgggacttgtggggtccttctcctgtcactggttatcaccctttactgccggagggaccagaggctgccccccgatgcccacaagccccctgggggaggcagtttccggacccccatccaagaggagcaggccgacgcccactccaccctggccaagatcagagtgaagttcagcaggagcgcagacgcccccgcgtaccagcagggccagaaccagctctataacgagctcaatctaggacgaagagaggagtacgatgttttggacaagagacgtggccgggaccctgagatggggggaaagccgagaaggaagaaccctcaggaaggcctgtacaatgaactgcagaaagataagatggcggaggcctacagtgagattgggatgaaaggcgagcgccggaggggcaaggggcacgatggcctttaccagggtctcagtacagccaccaaggacacctacgacgcccttcacatgcaggccctgccccctcgcggctctggcgagggaaggggttccctgcttacttgcggcgacgtcgaagagaatcccggtccgatggccctcccagtaactgccctccttttgcccctcgcactccttcttcatgccgctcgccccaactgggtcaacgtgattagcgatttgaagaaaatcgaggaccttatacagtctatgcatattgacgctacactgtatactgagagtgatgtacacccgtcctgtaaggtaacggccatgaaatgctttcttctggagctccaggtcatcagcttggagtctggggacgcaagcatccacgatacggttgaaaacctcatcatccttgcgaacaactctctctcatctaatggaaacgttacagagagtgggtgtaaggagtgcgaagagttggaagaaaaaaacatcaaagaatttcttcaatccttcgttcacatagtgcaaatgttcattaacacgtccactaccacacccgccccgaggccacctacgccggcaccgactatcgccagtcaacccctctctctgcgccccgaggcttgccggcctgcggctggtggggcggtccacacccggggcctggattttgcgtgcgatatatacatctgggcacctcttgccggcacctgcggagtgctgcttctctcactcgttattacgctgtactgctaa

SEQ ID NO: 278 - DNA, 2112 bp, synthetic construct
  source 1..2112: mol_type = other DNA
atggccttaccagtgaccgccttgctcctgccgctggccttgctgctccacgccgccaggccgcaggtgcagctggtgcagtctggggctgaggtgaagaagcctggggcctcagtgaaggtctcctgcaaggcttctggatacaccttcaccagttattatatccactgggtgcgacaggccccgggacaagggcttgagtggatgggatggatgaacccaaacagtggtaacgccggctatgcacagaagttccagggcagagtcaccatgaccagggatacctccacaagcacagtgtacatggagctgagcagcctgagatctgaggacacggccgtgtattactgtgcgagagagtactgggggagctttgactactggggccaagggaccctggtcaccgtctcctcaggtggaggcggttcaggcggaggtggctctggcggtggcggatcggacatccagatgacccagtctccatcctccctgtctgcatctgtaggagacagagtcaccatcacttgccgggcaagtcaggggattagcaataacttaaattggtatcagcagaaaccagggaaagcccctaagctcctgatctatgatgcatccaacttggaaactggggtcccatcaaggttcagtggcagtggatctgggacagatttcactctcaccatcagcagtctgcaacctgaagattttgcaacttactactgtcaacagagttacagtaccccttatacgttcggccaagggaccaaggtggaaatcaaaaccacgacgccagcgccgcggccaccaacaccggcgcccaccatcgcgtcgcagcccctgtccctgcgcccagaggcgtgccggccagcggcggggggcgcagtgcacacgagggggctggacttcgcctgtgatatctacatctgggcgcccttggccgggacttgtggggtccttctcctgtcactggttatcaccctttactgccggagggaccagaggctgccccccgatgcccacaagccccctgggggaggcagtttccggacccccatccaagaggagcaggccgacgcccactccaccctggccaagatcagagtgaagttcagcaggagcgcagacgcccccgcgtaccagcagggccagaaccagctctataacgagctcaatctaggacgaagagaggagtacgatgttttggacaagagacgtggccgggaccctgagatggggggaaagccgagaaggaagaaccctcaggaaggcctgtacaatgaactgcagaaagataagatggcggaggcctacagtgagattgggatgaaaggcgagcgccggaggggcaaggggcacgatggcctttaccagggtctcagtacagccaccaaggacacctacgacgcccttcacatgcaggccctgccccctcgcggctctggcgagggaaggggttccctgcttacttgcggcgacgtcgaagagaatcccggtccgatggccctcccagtaactgccctccttttgcccctcgcactccttcttcatgccgctcgccccaactgggtcaacgtgattagcgatttgaagaaaatcgaggaccttatacagtctatgcatattgacgctacactgtatactgagagtgatgtacacccgtcctgtaaggtaacggccatgaaatgctttcttctggagctccaggtcatcagcttggagtctggggacgcaagcatccacgatacggttgaaaacctcatcatccttgcgaacaactctctctcatctaatggaaacgttacagagagtgggtgtaaggagtgcgaagagttggaagaaaaaaacatcaaagaatttcttcaatccttcgttcacatagtgcaaatgttcattaacacgtccactaccacacccgccccgaggccacctacgccggcaccgactatcgccagtcaacccctctctctgcgccccgaggcttgccggcctgcggctggtggggcggtccacacccggggcctggattttgcgtgcgatatatacatctgggcacctcttgccggcacctgcggagtgctgcttctctcactcgttattacgctgtactgctaa

SEQ ID NO: 279 - DNA, 2115 bp, synthetic construct
  source 1..2115: mol_type = other DNA
atggccttaccagtgaccgccttgctcctgccgctggccttgctgctccacgccgccaggccgcaggtgcagctggtgcagtctggggctgaggtgaagaagcctggggcctcagtgaaggtttcctgcaaggcatctggatacaccttcaccggctactatatgcactgggtgcgacaggcccctggacaagggcttgagtggatgggaatgatcgatccaagcgacggtagcacaatttacgcacagaagttccagggcagagtcaccatgaccagggacacgtccacgagcacagtctacatggagctgagcagcctgagatctgaggacacggccgtgtattactgtgctagagagcggccactgtacgcttccgacctgtggggccaagggaccctggtcaccgtctcctcaggtggaggcggttcaggcggaggtggctctggcggtggcggatcggatatccagatgacccagtctccatcctccctgtctgcatctgtaggagacagagtcaccatcacttgccgggcaagtcaggacattggaaatgatttaggctggtatcagcagaaaccagggaaagcccctaagctcctgatctatgctgcatccagtttacaaagtggggtcccatcaaggttcagcggcagtggatctggcacagatttcactctcaccatcagcagcctgcagcctgaagattttgcaacttattactgtctacaagattacgactaccctctcactttcggccaggggaccaaggtggagatcaaaaccacgacgccagcgccgcggccaccaacaccggcgcccaccatcgcgtcgcagcccctgtccctgcgcccagaggcgtgccggccagcggcggggggcgcagtgcacacgagggggctggacttcgcctgtgatatctacatctgggcgcccttggccgggacttgtggggtccttctcctgtcactggttatcaccctttactgccggagggaccagaggctgccccccgatgcccacaagccccctgggggaggcagtttccggacccccatccaagaggagcaggccgacgcccactccaccctggccaagatcagagtgaagttcagcaggagcgcagacgcccccgcgtaccagcagggccagaaccagctctataacgagctcaatctaggacgaagagaggagtacgatgttttggacaagagacgtggccgggaccctgagatggggggaaagccgagaaggaagaaccctcaggaaggcctgtacaatgaactgcagaaagataagatggcggaggcctacagtgagattgggatgaaaggcgagcgccggaggggcaaggggcacgatggcctttaccagggtctcagtacagccaccaaggacacctacgacgcccttcacatgcaggccctgccccctcgcggctctggcgagggaaggggttccctgcttacttgcggcgacgtcgaagagaatcccggtccgatggccctcccagtaactgccctccttttgcccctcgcactccttcttcatgccgctcgccccaactgggtcaacgtgattagcgatttgaagaaaatcgaggaccttatacagtctatgcatattgacgctacactgtatactgagagtgatgtacacccgtcctgtaaggtaacggccatgaaatgctttcttctggagctccaggtcatcagcttggagtctggggacgcaagcatccacgatacggttgaaaacctcatcatccttgcgaacaactctctctcatctaatggaaacgttacagagagtgggtgtaaggagtgcgaagagttggaagaaaaaaacatcaaagaatttcttcaatccttcgttcacatagtgcaaatgttcattaacacgtccactaccacacccgccccgaggccacctacgccggcaccgactatcgccagtcaacccctctctctgcgccccgaggcttgccggcctgcggctggtggggcggtccacacccggggcctggattttgcgtgcgatatatacatctgggcacctcttgccggcacctgcggagtgctgcttctctcactcgttattacgctgtactgctaa

SEQ ID NO: 280 - DNA, 2118 bp, synthetic construct
  source 1..2118: mol_type = other DNA
atggccttaccagtgaccgccttgctcctgccgctggccttgctgctccacgccgccaggccgcaggtgcagctggtgcagtctggggctgaggtgaagaagcctgggtcttcagtgaaggtttcctgcaaggcatctggatacaccttcaccaactactatatgcactgggtgcgacaggcccctggacaagggcttgagtggatgggatggatgaaccccgatagtggtaatacagggtacgcacagaagttccagggcagagtcaccatcaccgctgacgaatccacgagcacagcctacatggagctgagcagcctgagatctgaggacacggccgtgtattactgtgctagaagtagcagctcctggcctgacttcgatctctggggccgtggcaccctggtcactgtctcctcaggtggaggcggttcaggcggaggtggctctggcggtggcggatcggacatccagatgacccagtctccatcctccctgtctgcatctgtaggagacagagtcaccatcacttgccgggcaagtcagagcattagcagctatttaaattggtatcagcagaaaccagggaaagcccctaagctcctgatctatgatgcatccaacttggagactggggtcccatcaaggttcagtggcagtggatctgggacagatttcactctcaccatcagcagtctgcaacctgaagattttgcaacttactactgtcaacagagttacaacaccccttacagttttggccaggggaccaaggtggagatcaaaaccacgacgccagcgccgcggccaccaacaccggcgcccaccatcgcgtcgcagcccctgtccctgcgcccagaggcgtgccggccagcggcggggggcgcagtgcacacgagggggctggacttcgcctgtgatatctacatctgggcgcccttggccgggacttgtggggtccttctcctgtcactggttatcaccctttactgccggagggaccagaggctgccccccgatgcccacaagccccctgggggaggcagtttccggacccccatccaagaggagcaggccgacgcccactccaccctggccaagatcagagtgaagttcagcaggagcgcagacgcccccgcgtaccagcagggccagaaccagctctataacgagctcaatctaggacgaagagaggagtacgatgttttggacaagagacgtggccgggaccctgagatggggggaaagccgagaaggaagaaccctcaggaaggcctgtacaatgaactgcagaaagataagatggcggaggcctacagtgagattgggatgaaaggcgagcgccggaggggcaaggggcacgatggcctttaccagggtctcagtacagccaccaaggacacctacgacgcccttcacatgcaggccctgccccctcgcggctctggcgagggaaggggttccctgcttacttgcggcgacgtcgaagagaatcccggtccgatggccctcccagtaactgccctccttttgcccctcgcactccttcttcatgccgctcgccccaactgggtcaacgtgattagcgatttgaagaaaatcgaggaccttatacagtctatgcatattgacgctacactgtatactgagagtgatgtacacccgtcctgtaaggtaacggccatgaaatgctttcttctggagctccaggtcatcagcttggagtctggggacgcaagcatccacgatacggttgaaaacctcatcatccttgcgaacaactctctctcatctaatggaaacgttacagagagtgggtgtaaggagtgcgaagagttggaagaaaaaaacatcaaagaatttcttcaatccttcgttcacatagtgcaaatgttcattaacacgtccactaccacacccgccccgaggccacctacgccggcaccgactatcgccagtcaacccctctctctgcgccccgaggcttgccggcctgcggctggtggggcggtccacacccggggcctggattttgcgtgcgatatatacatctgggcacctcttgccggcacctgcggagtgctgcttctctcactcgttattacgctgtactgctaa

SEQ ID NO: 281 - DNA, 2121 bp, synthetic construct
  source 1..2121: mol_type = other DNA
atggccttaccagtgaccgccttgctcctgccgctggccttgctgctccacgccgccaggccgcaggtccaactcgtacaatccggcgcagaagtcaaaaaacccggcgcaagcgtcaaggtatcatgtaaagctagcgggtatacatttacatcctattccatgcattgggtacgccaagctccaggccagggcctggaatgggtcggtatcattaatcccagttccggctctgccagttatgcgcaaaaatttcaaggaagggtgacaatgactcgagataccagtacctccactgtgtatatggaactgtcctcactaaggagcgaagatactgctgtatactactgcgcacgcgaacgtggggcctatagtagtaccttcgactattggggtcagggcacgttagtgacagtgtcttccggtggaggcggttcaggcggaggtggctctggcggtggcggatcggacatccagatgacccagtctccatcctccctgtctgcatctgtaggagacagagtcaccatcacttgccggacaagtcagagcattagcagctatttaaattggtatcagcagaaaccagggaaagcccctaagctcctgatctatgacgcatccaatttggaaaccggggtcccatcaaggttcagtggcagtggatctgggacagatttcactctcaccatcagcagtctgcaacctgaagattttgcaacttactactgtcttcaggactacagttaccctctcactttcggccaagggaccaaggtggagatcaaaaccacgacgccagcgccgcggccaccaacaccggcgcccaccatcgcgtcgcagcccctgtccctgcgcccagaggcgtgccggccagcggcggggggcgcagtgcacacgagggggctggacttcgcctgtgatatctacatctgggcgcccttggccgggacttgtggggtccttctcctgtcactggttatcaccctttactgccggagggaccagaggctgccccccgatgcccacaagccccctgggggaggcagtttccggacccccatccaagaggagcaggccgacgcccactccaccctggccaagatcagagtgaagttcagcaggagcgcagacgcccccgcgtaccagcagggccagaaccagctctataacgagctcaatctaggacgaagagaggagtacgatgttttggacaagagacgtggccgggaccctgagatggggggaaagccgagaaggaagaaccctcaggaaggcctgtacaatgaactgcagaaagataagatggcggaggcctacagtgagattgggatgaaaggcgagcgccggaggggcaaggggcacgatggcctttaccagggtctcagtacagccaccaaggacacctacgacgcccttcacatgcaggccctgccccctcgcggctctggcgagggaaggggttccctgcttacttgcggcgacgtcgaagagaatcccggtccgatggccctcccagtaactgccctccttttgcccctcgcactccttcttcatgccgctcgccccaactgggtcaacgtgattagcgatttgaagaaaatcgaggaccttatacagtctatgcatattgacgctacactgtatactgagagtgatgtacacccgtcctgtaaggtaacggccatgaaatgctttcttctggagctccaggtcatcagcttggagtctggggacgcaagcatccacgatacggttgaaaacctcatcatccttgcgaacaactctctctcatctaatggaaacgttacagagagtgggtgtaaggagtgcgaagagttggaagaaaaaaacatcaaagaatttcttcaatccttcgttcacatagtgcaaatgttcattaacacgtccactaccacacccgccccgaggccacctacgccggcaccgactatcgccagtcaacccctctctctgcgccccgaggcttgccggcctgcggctggtggggcggtccacacccggggcctggattttgcgtgcgatatatacatctgggcacctcttgccggcacctgcggagtgctgcttctctcactcgttattacgctgtactgctaa

SEQ ID NO: 282 - DNA, 2121 bp, synthetic construct
  source 1..2121: mol_type = other DNA
atggccttaccagtgaccgccttgctcctgccgctggccttgctgctccacgccgccaggccgcaggtgcagctggtgcagtctggggctgaggtgaagaagcctggggcctcagtgaaggtttcctgcaaggcatctggatacaccttcaccgactactatatgcactgggtgcgacaggcccctggacaagggcttgagtggatgggagtcatcaacccctctgatggtacagctcattacgcacagcggctgcagggcagagtcaccatgaccagggacacgtccacgagcacagtctacatggagctgagcagcctgagatctgaggacacggccgtgtattactgtgctagagacagcggatcttactacgctgactttgactactggggccaagggaccctggtcaccgtctcctcaggtggaggcggttcaggcggaggtggctctggcggtggcggatcggacatccagatgacccagtctccatcctccctgtctgcatctgtaggagacagagtcaccatcacttgccaggcaagtcaggacattagcaattatttaaattggtatcagcagaaaccagggaaagcccctaagctcctgatctatgatgcatccagtttgcaaagtggggtcccatcaaggttcagtggcagtggatctgggacagatttcactctcaccatcagcagtctgcaacctgaagattttgcaacttactactgtcaacagagttacagtacccctcccgccttcggccaagggaccaaggtggaaatcaaaaccacgacgccagcgccgcggccaccaacaccggcgcccaccatcgcgtcgcagcccctgtccctgcgcccagaggcgtgccggccagcggcggggggcgcagtgcacacgagggggctggacttcgcctgtgatatctacatctgggcgcccttggccgggacttgtggggtccttctcctgtcactggttatcaccctttactgccggagggaccagaggctgccccccgatgcccacaagccccctgggggaggcagtttccggacccccatccaagaggagcaggccgacgcccactccaccctggccaagatcagagtgaagttcagcaggagcgcagacgcccccgcgtaccagcagggccagaaccagctctataacgagctcaatctaggacgaagagaggagtacgatgttttggacaagagacgtggccgggaccctgagatggggggaaagccgagaaggaagaaccctcaggaaggcctgtacaatgaactgcagaaagataagatggcggaggcctacagtgagattgggatgaaaggcgagcgccggaggggcaaggggcacgatggcctttaccagggtctcagtacagccaccaaggacacctacgacgcccttcacatgcaggccctgccccctcgcggctctggcgagggaaggggttccctgcttacttgcggcgacgtcgaagagaatcccggtccgatggccctcccagtaactgccctccttttgcccctcgcactccttcttcatgccgctcgccccaactgggtcaacgtgattagcgatttgaagaaaatcgaggaccttatacagtctatgcatattgacgctacactgtatactgagagtgatgtacacccgtcctgtaaggtaacggccatgaaatgctttcttctggagctccaggtcatcagcttggagtctggggacgcaagcatccacgatacggttgaaaacctcatcatccttgcgaacaactctctctcatctaatggaaacgttacagagagtgggtgtaaggagtgcgaagagttggaagaaaaaaacatcaaagaatttcttcaatccttcgttcacatagtgcaaatgttcattaacacgtccactaccacacccgccccgaggccacctacgccggcaccgactatcgccagtcaacccctctctctgcgccccgaggcttgccggcctgcggctggtggggcggtccacacccggggcctggattttgcgtgcgatatatacatctgggcacctcttgccggcacctgcggagtgctgcttctctcactcgttattacgctgtactgctaa

SEQ ID NO: 283 - DNA, 2916 bp, synthetic construct
  source 1..2916: mol_type = other DNA
atggccttaccagtgaccgccttgctcctgccgctggccttgctgctccacgccgccaggccgcaggtgcagctggtgcagtctggggctgaggtgaagaagcctggggcctcagtgaaggtttcctgcaaggcatctggatacagtttcaccagctactatatgcactgggtgcgacaggcccctggacaagggcttgagtggatgggaataatcaaccctagtggtgggactacaagctacgcacagaagttccagggcagagtcaccatgaccagggacacgtccacgagcacagtctacatggagctgagcagcctgagatctgaggacacggccgtgtattactgtgctagagacaattccccgtatagctcaagctggtgggactactttgactactggggccaagggaccctggtcaccgtctcctcaggtggaggcggttcaggcggaggtggctctggcggtggcggatcggacatccagatgacccagtctccatcctccctgtctgcatctgtaggagacagagtcaccatcacttgccgggcaagtcaggacattcggcattatttagcatggtatcagcagaaaccagggaaagcccctaagctcctgatctatgacgcatccagtttgcaaagtggggtcccatcaaggttcagtggcagtggatctgggacagatttcactctcaccatcagcagtctgcaacctgaagattttgcaacttactactgtcaacagacctacgacgcacctatcaccttcggccaagggacacgactggagattaaaggtggcggtggctcgggcggtggtgggtcgggtggcggcggatctcaggtgcagctggtgcagtctggggctgaggtgaagaagcctggggcctcagtgaaggtttcctgcaaggcatctggatacagtttcaccagctactatatgcactgggtgcgacaggcccctggacaagggcttgagtggatgggaataatcaaccctagtggtgggactacaagctacgcacagaagttccagggcagagtcaccatgaccagggacacgtccacgagcacagtctacatggagctgagcagcctgagatctgaggacacggccgtgtattactgtgctagagacaattccccgtatagctcaagctggtgggactactttgactactggggccaagggaccctggtcaccgtctcctcaggtggaggcggttcaggcggaggtggctctggcggtggcggatcggacatccagatgacccagtctccatcctccctgtctgcatctgtaggagacagagtcaccatcacttgccgggcaagtcaggacattcggcattatttagcatggtatcagcagaaaccagggaaagcccctaagctcctgatctatgacgcatccagtttgcaaagtggggtcccatcaaggttcagtggcagtggatctgggacagatttcactctcaccatcagcagtctgcaacctgaagattttgcaacttactactgtcaacagacctacgacgcacctatcaccttcggccaagggacacgactggagattaaaaccacgacgccagcgccgcggccaccaacaccggcgcccaccatcgcgtcgcagcccctgtccctgcgcccagaggcgtgccggccagcggcggggggcgcagtgcacacgagggggctggacttcgcctgtgatatctacatctgggcgcccttggccgggacttgtggggtccttctcctgtcactggttatcaccctttactgccggagggaccagaggctgccccccgatgcccacaagccccctgggggaggcagtttccggacccccatccaagaggagcaggccgacgcccactccaccctggccaagatcagagtgaagttcagcaggagcgcagacgcccccgcgtaccagcagggccagaaccagctctataacgagctcaatctaggacgaagagaggagtacgatgttttggacaagagacgtggccgggaccctgagatggggggaaagccgagaaggaagaaccctcaggaaggcctgtacaatgaactgcagaaagataagatggcggaggcctacagtgagattgggatgaaaggcgagcgccggaggggcaaggggcacgatggcctttaccagggtctcagtacagccaccaaggacacctacgacgcccttcacatgcaggccctgccccctcgcggctctggcgagggaaggggttccctgcttacttgcggcgacgtcgaagagaatcccggtccgatggccctcccagtaactgccctccttttgcccctcgcactccttcttcatgccgctcgccccaactgggtcaacgtgattagcgatttgaagaaaatcgaggaccttatacagtctatgcatattgacgctacactgtatactgagagtgatgtacacccgtcctgtaaggtaacggccatgaaatgctttcttctggagctccaggtcatcagcttggagtctggggacgcaagcatccacgatacggttgaaaacctcatcatccttgcgaacaactctctctcatctaatggaaacgttacagagagtgggtgtaaggagtgcgaagagttggaagaaaaaaacatcaaagaatttcttcaatccttcgttcacatagtgcaaatgttcattaacacgtccactaccacacccgccccgaggccacctacgccggcaccgactatcgccagtcaacccctctctctgcgccccgaggcttgccggcctgcggctggtggggcggtccacacccggggcctggattttgcgtgcgatatatacatctgggcacctcttgccggcacctgcggagtgctgcttctctcactcgttattacgctgtactgctaa

SEQ ID NO: 284 - DNA, 2916 bp, synthetic construct
  source 1..2916: mol_type = other DNA
atggccttaccagtgaccgccttgctcctgccgctggccttgctgctccacgccgccaggccgcaggtgcagctggtgcagtctggggctgaggtgaagaagcctgggtcctcggtgaaggtctcctgcaaggcttctggatacaccttcaccagctatggaatcagctgggtgcgacaggcccctggacaagggcttgagtggatgggaggtatcatccctatctttggtacaacgaactacgcacagaagttccagggcagagtcacgattaccgcggacgaatccacgagcacagcctacatggagctgagcagcctgagatctgaggacacggccgtgtattactgtgcgagagatcatagcggcgatgggtacttcgatctctggggccgtggcaccctggtcactgtctcctcaggtggaggcggttcaggcggaggtggctctggcggtggcggatcggatattgtgatgactcagtctccactctccctgcccgtcacccctggagagccggcctccatctcctgcaggtctagtcagagcctcctgcactccaacggatacaactatttggattggtacctgcagaagccagggcagtctccacagctcctgatctatgatgcctcttcacttcagtccggggtccctgacaggttcagtggcagtggatcaggcacagattttacactgaaaatcagcagagtggaggctgaggatgttggggtttattactgcatgcaaggaacacactggcctcccacgttcggccaagggaccaaggtggaaatcaaaggtggcggtggctcgggcggtggtgggtcgggtggcggcggatctcaggtgcagctggtgcagtctggggctgaggtgaagaagcctgggtcctcggtgaaggtctcctgcaaggcttctggatacaccttcaccagctatggaatcagctgggtgcgacaggcccctggacaagggcttgagtggatgggaggtatcatccctatctttggtacaacgaactacgcacagaagttccagggcagagtcacgattaccgcggacgaatccacgagcacagcctacatggagctgagcagcctgagatctgaggacacggccgtgtattactgtgcgagagatcatagcggcgatgggtacttcgatctctggggccgtggcaccctggtcactgtctcctcaggtggaggcggttcaggcggaggtggctctggcggtggcggatcggatattgtgatgactcagtctccactctccctgcccgtcacccctggagagccggcctccatctcctgcaggtctagtcagagcctcctgcactccaacggatacaactatttggattggtacctgcagaagccagggcagtctccacagctcctgatctatgatgcctcttcacttcagtccggggtccctgacaggttcagtggcagtggatcaggcacagattttacactgaaaatcagcagagtggaggctgaggatgttggggtttattactgcatgcaaggaacacactggcctcccacgttcggccaagggaccaaggtggaaatcaaaaccacgacgccagcgccgcggccaccaacaccggcgcccaccatcgcgtcgcagcccctgtccctgcgcccagaggcgtgccggccagcggcggggggcgcagtgcacacgagggggctggacttcgcctgtgatatctacatctgggcgcccttggccgggacttgtggggtccttctcctgtcactggttatcaccctttactgccggagggaccagaggctgccccccgatgcccacaagccccctgggggaggcagtttccggacccccatccaagaggagcaggccgacgcccactccaccctggccaagatcagagtgaagttcagcaggagcgcagacgcccccgcgtaccagcagggccagaaccagctctataacgagctcaatctaggacgaagagaggagtacgatgttttggacaagagacgtggccgggaccctgagatggggggaaagccgagaaggaagaaccctcaggaaggcctgtacaatgaactgcagaaagataagatggcggaggcctacagtgagattgggatgaaaggcgagcgccggaggggcaaggggcacgatggcctttaccagggtctcagtacagccaccaaggacacctacgacgcccttcacatgcaggccctgccccctcgcggctctggcgagggaaggggttccctgcttacttgcggcgacgtcgaagagaatcccggtccgatggccctcccagtaactgccctccttttgcccctcgcactccttcttcatgccgctcgccccaactgggtcaacgtgattagcgatttgaagaaaatcgaggaccttatacagtctatgcatattgacgctacactgtatactgagagtgatgtacacccgtcctgtaaggtaacggccatgaaatgctttcttctggagctccaggtcatcagcttggagtctggggacgcaagcatccacgatacggttgaaaacctcatcatccttgcgaacaactctctctcatctaatggaaacgttacagagagtgggtgtaaggagtgcgaagagttggaagaaaaaaacatcaaagaatttcttcaatccttcgttcacatagtgcaaatgttcattaacacgtccactaccacacccgccccgaggccacctacgccggcaccgactatcgccagtcaacccctctctctgcgccccgaggcttgccggcctgcggctggtggggcggtccacacccggggcctggattttgcgtgcgatatatacatctgggcacctcttgccggcacctgcggagtgctgcttctctcactcgttattacgctgtactgctaa

SEQ ID NO: 285 - DNA, 2880 bp, synthetic construct
  source 1..2880: mol_type = other DNA
atggccttaccagtgaccgccttgctcctgccgctggccttgctgctccacgccgccaggccgcaggtgcagctggtgcagtctggggctgaggtgaagaagcctggggcctcagtgaaggtctcctgcaaggcttctggatacaccttcaccgagaatgagatgcactgggtgcgacaggcccctggacaagggcttgagtggatgggatggatcaacccgaacagtggtggcacaaactatgcacagaagtttcagggcagggtcaccatgaccagggacacgtccactagcacagtgtacatggagctgagctctctgagatctgaagacacggccgtgtattactgtgcggggagctggggtggttactactttgactactggggccaagggaccctggtcaccgtctcctcaggtggaggcggttcaggcggaggtggctctggcggtggcggatcggacatccagatgacccagtctccatcctccctgtctgcatctgtaggagacagagtcaccatcacttgccgggcaagtcagagcgttagcagatatttaaattggtatcagcagaaaccagggaaagcccctaagctcctgatctatgatgcatccaatttggaaaccggggtcccatcaaggttcagtggcagtggatctgggacagatttcactctcaccatcagcagtctgcaacctgaagattttgcaacttactactgtcaacaggccgacagtttccctgtgacttttggccaggggaccaagctggagatcaaaggtggcggtggctcgggcggtggtgggtcgggtggcggcggatctcaggtgcagctggtgcagtctggggctgaggtgaagaagcctggggcctcagtgaaggtctcctgcaaggcttctggatacaccttcaccgagaatgagatgcactgggtgcgacaggcccctggacaagggcttgagtggatgggatggatcaacccgaacagtggtggcacaaactatgcacagaagtttcagggcagggtcaccatgaccagggacacgtccactagcacagtgtacatggagctgagctctctgagatctgaagacacggccgtgtattactgtgcggggagctggggtggttactactttgactactggggccaagggaccctggtcaccgtctcctcaggtggaggcggttcaggcggaggtggctctggcggtggcggatcggacatccagatgacccagtctccatcctccctgtctgcatctgtaggagacagagtcaccatcacttgccgggcaagtcagagcgttagcagatatttaaattggtatcagcagaaaccagggaaagcccctaagctcctgatctatgatgcatccaatttggaaaccggggtcccatcaaggttcagtggcagtggatctgggacagatttcactctcaccatcagcagtctgcaacctgaagattttgcaacttactactgtcaacaggccgacagtttccctgtgacttttggccaggggaccaagctggagatcaaaaccacgacgccagcgccgcggccaccaacaccggcgcccaccatcgcgtcgcagcccctgtccctgcgcccagaggcgtgccggccagcggcggggggcgcagtgcacacgagggggctggacttcgcctgtgatatctacatctgggcgcccttggccgggacttgtggggtccttctcctgtcactggttatcaccctttactgccggagggaccagaggctgccccccgatgcccacaagccccctgggggaggcagtttccggacccccatccaagaggagcaggccgacgcccactccaccctggccaagatcagagtgaagttcagcaggagcgcagacgcccccgcgtaccagcagggccagaaccagctctataacgagctcaatctaggacgaagagaggagtacgatgttttggacaagagacgtggccgggaccctgagatggggggaaagccgagaaggaagaaccctcaggaaggcctgtacaatgaactgcagaaagataagatggcggaggcctacagtgagattgggatgaaaggcgagcgccggaggggcaaggggcacgatggcctttaccagggtctcagtacagccaccaaggacacctacgacgcccttcacatgcaggccctgccccctcgcggctctggcgagggaaggggttccctgcttacttgcggcgacgtcgaagagaatcccggtccgatggccctcccagtaactgccctccttttgcccctcgcactccttcttcatgccgctcgccccaactgggtcaacgtgattagcgatttgaagaaaatcgaggaccttatacagtctatgcatattgacgctacactgtatactgagagtgatgtacacccgtcctgtaaggtaacggccatgaaatgctttcttctggagctccaggtcatcagcttggagtctggggacgcaagcatccacgatacggttgaaaacctcatcatccttgcgaacaactctctctcatctaatggaaacgttacagagagtgggtgtaaggagtgcgaagagttggaagaaaaaaacatcaaagaatttcttcaatccttcgttcacatagtgcaaatgttcattaacacgtccactaccacacccgccccgaggccacctacgccggcaccgactatcgccagtcaacccctctctctgcgccccgaggcttgccggcctgcggctggtggggcggtccacacccggggcctggattttgcgtgcgatatatacatctgggcacctcttgccggcacctgcggagtgctgcttctctcactcgttattacgctgtactgctaa

SEQ ID NO: 286 - DNA, 2925 bp, synthetic construct
  source 1..2925: mol_type = other DNA
atggccttaccagtgaccgccttgctcctgccgctggccttgctgctccacgccgccaggccgcaggtgcagctggtgcagtctggggctgaggtgaagaagcctggggcctcagtgaaggtttcctgcaaggcatctggatacagtttcaccagctactatatgcactgggtgcgacaggcccctggacaagggcttgagtggatgggaataatcaaccctagtggtgggactacaagctacgcacagaagttccagggcagagtcaccatgaccagggacacgtccacgagcacagtctacatggagctgagcagcctgagatctgaggacacggccgtgtattactgtgctagagacaattccccgtatagctcaagctggtgggactactttgactactggggccaagggaccctggtcaccgtctcctcaggtggaggcggttcaggcggaggtggctctggcggtggcggatcggacatccagatgacccagtctccatcctccctgtctgcatctgtaggagacagagtcaccatcacttgccgggcaagtcaggacattcggcattatttagcatggtatcagcagaaaccagggaaagcccctaagctcctgatctatgacgcatccagtttgcaaagtggggtcccatcaaggttcagtggcagtggatctgggacagatttcactctcaccatcagcagtctgcaacctgaagattttgcaacttactactgtcaacagacctacgacgcacctatcaccttcggccaagggacacgactggagattaaaggtggcggtggctcgggcggtggtgggtcgggtggcggcggatctcaggtgcagctggtgcagtctggggctgaggtgaagaagcctgggtcctcggtgaaggtctcctgcaaggcttctggaggcaccttcagcagctatgctatcagctgggtgcgacaggcccctggacaagggcttgagtggatgggaggaatcacaccaatgtttggtacaacggactacgcacagaagttccagggcagagtcacgattaccgcggacgaatccacgagcacagcctacatggagctgagcagcctgagatctgaggacacggccgtgtattactgtgcgagagatgagcgggacggatacgccacagtggcttttgatatctggggccaagggacaatggtcaccgtctcttcaggtggaggcggttcaggcggaggtggctctggcggtggcggatcggatattgtgatgactcagtctccactctccctgcccgtcacccctggagagccggcctccatctcctgcaggtctagtcagagcctcctgcatagcaatggatacaactatttggattggtacctgcagaagccagggcagtctccacagctcctgatctatgatgcttctaatcttgagacaggggtccctgacaggttcagtggcagtggatcaggcacagattttacactgaaaatcagcagagtggaggctgaggatgttggggtttattactgcatgcaagggacgcattggcctcccacgttcggccaagggaccaaggtggaaatcaaaaccacgacgccagcgccgcggccaccaacaccggcgcccaccatcgcgtcgcagcccctgtccctgcgcccagaggcgtgccggccagcggcggggggcgcagtgcacacgagggggctggacttcgcctgtgatatctacatctgggcgcccttggccgggacttgtggggtccttctcctgtcactggttatcaccctttactgccggagggaccagaggctgccccccgatgcccacaagccccctgggggaggcagtttccggacccccatccaagaggagcaggccgacgcccactccaccctggccaagatcagagtgaagttcagcaggagcgcagacgcccccgcgtaccagcagggccagaaccagctctataacgagctcaatctaggacgaagagaggagtacgatgttttggacaagagacgtggccgggaccctgagatggggggaaagccgagaaggaagaaccctcaggaaggcctgtacaatgaactgcagaaagataagatggcggaggcctacagtgagattgggatgaaaggcgagcgccggaggggcaaggggcacgatggcctttaccagggtctcagtacagccaccaaggacacctacgacgcccttcacatgcaggccctgccccctcgcggctctggcgagggaaggggttccctgcttacttgcggcgacgtcgaagagaatcccggtccgatggccctcccagtaactgccctccttttgcccctcgcactccttcttcatgccgctcgccccaactgggtcaacgtgattagcgatttgaagaaaatcgaggaccttatacagtctatgcatattgacgctacactgtatactgagagtgatgtacacccgtcctgtaaggtaacggccatgaaatgctttcttctggagctccaggtcatcagcttggagtctggggacgcaagcatccacgatacggttgaaaacctcatcatccttgcgaacaactctctctcatctaatggaaacgttacagagagtgggtgtaaggagtgcgaagagttggaagaaaaaaacatcaaagaatttcttcaatccttcgttcacatagtgcaaatgttcattaacacgtccactaccacacccgccccgaggccacctacgccggcaccgactatcgccagtcaacccctctctctgcgccccgaggcttgccggcctgcggctggtggggcggtccacacccggggcctggattttgcgtgcgatatatacatctgggcacctcttgccggcacctgcggagtgctgcttctctcactcgttattacgctgtactgctaa

SEQ ID NO: 287 - DNA, 2910 bp, synthetic construct
  source 1..2910: mol_type = other DNA
atggccttaccagtgaccgccttgctcctgccgctggccttgctgctccacgccgccaggccgcaggtgcagctggtgcagtctggggctgaggtgaagaagcctggggcctcagtgaaggtttcctgcaaggcatctggatacagtttcaccagctactatatgcactgggtgcgacaggcccctggacaagggcttgagtggatgggaataatcaaccctagtggtgggactacaagctacgcacagaagttccagggcagagtcaccatgaccagggacacgtccacgagcacagtctacatggagctgagcagcctgagatctgaggacacggccgtgtattactgtgctagagacaattccccgtatagctcaagctggtgggactactttgactactggggccaagggaccctggtcaccgtctcctcaggtggaggcggttcaggcggaggtggctctggcggtggcggatcggacatccagatgacccagtctccatcctccctgtctgcatctgtaggagacagagtcaccatcacttgccgggcaagtcaggacattcggcattatttagcatggtatcagcagaaaccagggaaagcccctaagctcctgatctatgacgcatccagtttgcaaagtggggtcccatcaaggttcagtggcagtggatctgggacagatttcactctcaccatcagcagtctgcaacctgaagattttgcaacttactactgtcaacagacctacgacgcacctatcaccttcggccaagggacacgactggagattaaaggtggcggtggctcgggcggtggtgggtcgggtggcggcggatctcaggtgcagctggtgcagtctggggctgaggtgaagaagcctggggcctcagtgaaggtttcctgcaaggcatctggatacaccttcaccagctactatatgcactgggtgcgacaggcccctggacaagggcttgagtggatgggaataatcaaccctagtgacggaggaacaagctacgcagacaagttccagggcagagtcaccatgaccagggacacgtccacgagcacagtctacatggagctgagcagcctgagatctgaggacacggccgtgtattactgtgctagagcgcttgcccccctgggatggggtgacggcatggatgtctggggccaagggacaacagtcaccgtctcttcaggtggaggcggttcaggcggaggtggctctggcggtggcggatcggacatccagatgacccagtctccatcctccctgtctgcatctgtaggagacagagtcaccatcacttgccaggcgagtcaggacattagcaactatttaaattggtatcagcagaaaccagggaaagcccctaagctcctgatctacgatgcatccaatttggaaacaggggtcccatcaaggttcagtggaagtggatctgggacagattttactctcaccatcagcagcctgcagcctgaagatttcgcaacatattactgtcaacagtcatatgatggacctatcaccttcggccaagggacacgactggagattaaaaccacgacgccagcgccgcggccaccaacaccggcgcccaccatcgcgtcgcagcccctgtccctgcgcccagaggcgtgccggccagcggcggggggcgcagtgcacacgagggggctggacttcgcctgtgatatctacatctgggcgcccttggccgggacttgtggggtccttctcctgtcactggttatcaccctttactgccggagggaccagaggctgccccccgatgcccacaagccccctgggggaggcagtttccggacccccatccaagaggagcaggccgacgcccactccaccctggccaagatcagagtgaagttcagcaggagcgcagacgcccccgcgtaccagcagggccagaaccagctctataacgagctcaatctaggacgaagagaggagtacgatgttttggacaagagacgtggccgggaccctgagatggggggaaagccgagaaggaagaaccctcaggaaggcctgtacaatgaactgcagaaagataagatggcggaggcctacagtgagattgggatgaaaggcgagcgccggaggggcaaggggcacgatggcctttaccagggtctcagtacagccaccaaggacacctacgacgcccttcacatgcaggccctgccccctcgcggctctggcgagggaaggggttccctgcttacttgcggcgacgtcgaagagaatcccggtccgatggccctcccagtaactgccctccttttgcccctcgcactccttcttcatgccgctcgccccaactgggtcaacgtgattagcgatttgaagaaaatcgaggaccttatacagtctatgcatattgacgctacactgtatactgagagtgatgtacacccgtcctgtaaggtaacggccatgaaatgctttcttctggagctccaggtcatcagcttggagtctggggacgcaagcatccacgatacggttgaaaacctcatcatccttgcgaacaactctctctcatctaatggaaacgttacagagagtgggtgtaaggagtgcgaagagttggaagaaaaaaacatcaaagaatttcttcaatccttcgttcacatagtgcaaatgttcattaacacgtccactaccacacccgccccgaggccacctacgccggcaccgactatcgccagtcaacccctctctctgcgccccgaggcttgccggcctgcggctggtggggcggtccacacccggggcctggattttgcgtgcgatatatacatctgggcacctcttgccggcacctgcggagtgctgcttctctcactcgttattacgctgtactgctaa

SEQ ID NO: 288 - DNA, 2925 bp, synthetic construct
  source 1..2925: mol_type = other DNA
atggccttaccagtgaccgccttgctcctgccgctggccttgctgctccacgccgccaggccgcaggtgcagctggtgcagtctggggctgaggtgaagaagcctgggtcctcggtgaaggtctcctgcaaggcttctggatacaccttcaccagctatggaatcagctgggtgcgacaggcccctggacaagggcttgagtggatgggaggtatcatccctatctttggtacaacgaactacgcacagaagttccagggcagagtcacgattaccgcggacgaatccacgagcacagcctacatggagctgagcagcctgagatctgaggacacggccgtgtattactgtgcgagagatcatagcggcgatgggtacttcgatctctggggccgtggcaccctggtcactgtctcctcaggtggaggcggttcaggcggaggtggctctggcggtggcggatcggatattgtgatgactcagtctccactctccctgcccgtcacccctggagagccggcctccatctcctgcaggtctagtcagagcctcctgcactccaacggatacaactatttggattggtacctgcagaagccagggcagtctccacagctcctgatctatgatgcctcttcacttcagtccggggtccctgacaggttcagtggcagtggatcaggcacagattttacactgaaaatcagcagagtggaggctgaggatgttggggtttattactgcatgcaaggaacacactggcctcccacgttcggccaagggaccaaggtggaaatcaaaggtggcggtggctcgggcggtggtgggtcgggtggcggcggatctcaggtgcagctggtgcagtctggggctgaggtgaagaagcctgggtcctcggtgaaggtctcctgcaaggcttctggaggcaccttcagcagctatgctatcagctgggtgcgacaggcccctggacaagggcttgagtggatgggaggaatcacaccaatgtttggtacaacggactacgcacagaagttccagggcagagtcacgattaccgcggacgaatccacgagcacagcctacatggagctgagcagcctgagatctgaggacacggccgtgtattactgtgcgagagatgagcgggacggatacgccacagtggcttttgatatctggggccaagggacaatggtcaccgtctcttcaggtggaggcggttcaggcggaggtggctctggcggtggcggatcggatattgtgatgactcagtctccactctccctgcccgtcacccctggagagccggcctccatctcctgcaggtctagtcagagcctcctgcatagcaatggatacaactatttggattggtacctgcagaagccagggcagtctccacagctcctgatctatgatgcttctaatcttgagacaggggtccctgacaggttcagtggcagtggatcaggcacagattttacactgaaaatcagcagagtggaggctgaggatgttggggtttattactgcatgcaagggacgcattggcctcccacgttcggccaagggaccaaggtggaaatcaaaaccacgacgccagcgccgcggccaccaacaccggcgcccaccatcgcgtcgcagcccctgtccctgcgcccagaggcgtgccggccagcggcggggggcgcagtgcacacgagggggctggacttcgcctgtgatatctacatctgggcgcccttggccgggacttgtggggtccttctcctgtcactggttatcaccctttactgccggagggaccagaggctgccccccgatgcccacaagccccctgggggaggcagtttccggacccccatccaagaggagcaggccgacgcccactccaccctggccaagatcagagtgaagttcagcaggagcgcagacgcccccgcgtaccagcagggccagaaccagctctataacgagctcaatctaggacgaagagaggagtacgatgttttggacaagagacgtggccgggaccctgagatggggggaaagccgagaaggaagaaccctcaggaaggcctgtacaatgaactgcagaaagataagatggcggaggcctacagtgagattgggatgaaaggcgagcgccggaggggcaaggggcacgatggcctttaccagggtctcagtacagccaccaaggacacctacgacgcccttcacatgcaggccctgccccctcgcggctctggcgagggaaggggttccctgcttacttgcggcgacgtcgaagagaatcccggtccgatggccctcccagtaactgccctccttttgcccctcgcactccttcttcatgccgctcgccccaactgggtcaacgtgattagcgatttgaagaaaatcgaggaccttatacagtctatgcatattgacgctacactgtatactgagagtgatgtacacccgtcctgtaaggtaacggccatgaaatgctttcttctggagctccaggtcatcagcttggagtctggggacgcaagcatccacgatacggttgaaaacctcatcatccttgcgaacaactctctctcatctaatggaaacgttacagagagtgggtgtaaggagtgcgaagagttggaagaaaaaaacatcaaagaatttcttcaatccttcgttcacatagtgcaaatgttcattaacacgtccactaccacacccgccccgaggccacctacgccggcaccgactatcgccagtcaacccctctctctgcgccccgaggcttgccggcctgcggctggtggggcggtccacacccggggcctggattttgcgtgcgatatatacatctgggcacctcttgccggcacctgcggagtgctgcttctctcactcgttattacgctgtactgctaa

SEQ ID NO: 289 - DNA, 2910 bp, synthetic construct
  source 1..2910: mol_type = other DNA
atggccttaccagtgaccgccttgctcctgccgctggccttgctgctccacgccgccaggccgcaggtgcagctggtgcagtctggggctgaggtgaagaagcctgggtcctcggtgaaggtctcctgcaaggcttctggatacaccttcaccagctatggaatcagctgggtgcgacaggcccctggacaagggcttgagtggatgggaggtatcatccctatctttggtacaacgaactacgcacagaagttccagggcagagtcacgattaccgcggacgaatccacgagcacagcctacatggagctgagcagcctgagatctgaggacacggccgtgtattactgtgcgagagatcatagcggcgatgggtacttcgatctctggggccgtggcaccctggtcactgtctcctcaggtggaggcggttcaggcggaggtggctctggcggtggcggatcggatattgtgatgactcagtctccactctccctgcccgtcacccctggagagccggcctccatctcctgcaggtctagtcagagcctcctgcactccaacggatacaactatttggattggtacctgcagaagccagggcagtctccacagctcctgatctatgatgcctcttcacttcagtccggggtccctgacaggttcagtggcagtggatcaggcacagattttacactgaaaatcagcagagtggaggctgaggatgttggggtttattactgcatgcaaggaacacactggcctcccacgttcggccaagggaccaaggtggaaatcaaaggtggcggtggctcgggcggtggtgggtcgggtggcggcggatctcaggtgcagctggtgcagtctggggctgaggtgaagaagcctggggcctcagtgaaggtttcctgcaaggcatctggatacaccttcaccagctactatatgcactgggtgcgacaggcccctggacaagggcttgagtggatgggaataatcaaccctagtgacggaggaacaagctacgcagacaagttccagggcagagtcaccatgaccagggacacgtccacgagcacagtctacatggagctgagcagcctgagatctgaggacacggccgtgtattactgtgctagagcgcttgcccccctgggatggggtgacggcatggatgtctggggccaagggacaacagtcaccgtctcttcaggtggaggcggttcaggcggaggtggctctggcggtggcggatcggacatccagatgacccagtctccatcctccctgtctgcatctgtaggagacagagtcaccatcacttgccaggcgagtcaggacattagcaactatttaaattggtatcagcagaaaccagggaaagcccctaagctcctgatctacgatgcatccaatttggaaacaggggtcccatcaaggttcagtggaagtggatctgggacagattttactctcaccatcagcagcctgcagcctgaagatttcgcaacatattactgtcaacagtcatatgatggacctatcaccttcggccaagggacacgactggagattaaaaccacgacgccagcgccgcggccaccaacaccggcgcccaccatcgcgtcgcagcccctgtccctgcgcccagaggcgtgccggccagcggcggggggcgcagtgcacacgagggggctggacttcgcctgtgatatctacatctgggcgcccttggccgggacttgtggggtccttctcctgtcactggttatcaccctttactgccggagggaccagaggctgccccccgatgcccacaagccccctgggggaggcagtttccggacccccatccaagaggagcaggccgacgcccactccaccctggccaagatcagagtgaagttcagcaggagcgcagacgcccccgcgtaccagcagggccagaaccagctctataacgagctcaatctaggacgaagagaggagtacgatgttttggacaagagacgtggccgggaccctgagatggggggaaagccgagaaggaagaaccctcaggaaggcctgtacaatgaactgcagaaagataagatggcggaggcctacagtgagattgggatgaaaggcgagcgccggaggggcaaggggcacgatggcctttaccagggtctcagtacagccaccaaggacacctacgacgcccttcacatgcaggccctgccccctcgcggctctggcgagggaaggggttccctgcttacttgcggcgacgtcgaagagaatcccggtccgatggccctcccagtaactgccctccttttgcccctcgcactccttcttcatgccgctcgccccaactgggtcaacgtgattagcgatttgaagaaaatcgaggaccttatacagtctatgcatattgacgctacactgtatactgagagtgatgtacacccgtcctgtaaggtaacggccatgaaatgctttcttctggagctccaggtcatcagcttggagtctggggacgcaagcatccacgatacggttgaaaacctcatcatccttgcgaacaactctctctcatctaatggaaacgttacagagagtgggtgtaaggagtgcgaagagttggaagaaaaaaacatcaaagaatttcttcaatccttcgttcacatagtgcaaatgttcattaacacgtccactaccacacccgccccgaggccacctacgccggcaccgactatcgccagtcaacccctctctctgcgccccgaggcttgccggcctgcggctggtggggcggtccacacccggggcctggattttgcgtgcgatatatacatctgggcacctcttgccggcacctgcggagtgctgcttctctcactcgttattacgctgtactgctaa

SEQ ID NO: 290 - DNA, 2907 bp, synthetic construct
  source 1..2907: mol_type = other DNA
atggccttaccagtgaccgccttgctcctgccgctggccttgctgctccacgccgccaggccgcaggtgcagctggtgcagtctggggctgaggtgaagaagcctggggcctcagtgaaggtctcctgcaaggcttctggatacaccttcaccgagaatgagatgcactgggtgcgacaggcccctggacaagggcttgagtggatgggatggatcaacccgaacagtggtggcacaaactatgcacagaagtttcagggcagggtcaccatgaccagggacacgtccactagcacagtgtacatggagctgagctctctgagatctgaagacacggccgtgtattactgtgcggggagctggggtggttactactttgactactggggccaagggaccctggtcaccgtctcctcaggtggaggcggttcaggcggaggtggctctggcggtggcggatcggacatccagatgacccagtctccatcctccctgtctgcatctgtaggagacagagtcaccatcacttgccgggcaagtcagagcgttagcagatatttaaattggtatcagcagaaaccagggaaagcccctaagctcctgatctatgatgcatccaatttggaaaccggggtcccatcaaggttcagtggcagtggatctgggacagatttcactctcaccatcagcagtctgcaacctgaagattttgcaacttactactgtcaacaggccgacagtttccctgtgacttttggccaggggaccaagctggagatcaaaggtggcggtggctcgggcggtggtgggtcgggtggcggcggatctcaggtgcagctggtgcagtctggggctgaggtgaagaagcctgggtcctcggtgaaggtctcctgcaaggcttctggaggcaccttcagcagctatgctatcagctgggtgcgacaggcccctggacaagggcttgagtggatgggaggaatcacaccaatgtttggtacaacggactacgcacagaagttccagggcagagtcacgattaccgcggacgaatccacgagcacagcctacatggagctgagcagcctgagatctgaggacacggccgtgtattactgtgcgagagatgagcgggacggatacgccacagtggcttttgatatctggggccaagggacaatggtcaccgtctcttcaggtggaggcggttcaggcggaggtggctctggcggtggcggatcggatattgtgatgactcagtctccactctccctgcccgtcacccctggagagccggcctccatctcctgcaggtctagtcagagcctcctgcatagcaatggatacaactatttggattggtacctgcagaagccagggcagtctccacagctcctgatctatgatgcttctaatcttgagacaggggtccctgacaggttcagtggcagtggatcaggcacagattttacactgaaaatcagcagagtggaggctgaggatgttggggtttattactgcatgcaagggacgcattggcctcccacgttcggccaagggaccaaggtggaaatcaaaaccacgacgccagcgccgcggccaccaacaccggcgcccaccatcgcgtcgcagcccctgtccctgcgcccagaggcgtgccggccagcggcggggggcgcagtgcacacgagggggctggacttcgcctgtgatatctacatctgggcgcccttggccgggacttgtggggtccttctcctgtcactggttatcaccctttactgccggagggaccagaggctgccccccgatgcccacaagccccctgggggaggcagtttccggacccccatccaagaggagcaggccgacgcccactccaccctggccaagatcagagtgaagttcagcaggagcgcagacgcccccgcgtaccagcagggccagaaccagctctataacgagctcaatctaggacgaagagaggagtacgatgttttggacaagagacgtggccgggaccctgagatggggggaaagccgagaaggaagaaccctcaggaaggcctgtacaatgaactgcagaaagataagatggcggaggcctacagtgagattgggatgaaaggcgagcgccggaggggcaaggggcacgatggcctttaccagggtctcagtacagccaccaaggacacctacgacgcccttcacatgcaggccctgccccctcgcggctctggcgagggaaggggttccctgcttacttgcggcgacgtcgaagagaatcccggtccgatggccctcccagtaactgccctccttttgcccctcgcactccttcttcatgccgctcgccccaactgggtcaacgtgattagcgatttgaagaaaatcgaggaccttatacagtctatgcatattgacgctacactgtatactgagagtgatgtacacccgtcctgtaaggtaacggccatgaaatgctttcttctggagctccaggtcatcagcttggagtctggggacgcaagcatccacgatacggttgaaaacctcatcatccttgcgaacaactctctctcatctaatggaaacgttacagagagtgggtgtaaggagtgcgaagagttggaagaaaaaaacatcaaagaatttcttcaatccttcgttcacatagtgcaaatgttcattaacacgtccactaccacacccgccccgaggccacctacgccggcaccgactatcgccagtcaacccctctctctgcgccccgaggcttgccggcctgcggctggtggggcggtccacacccggggcctggattttgcgtgcgatatatacatctgggcacctcttgccggcacctgcggagtgctgcttctctcactcgttattacgctgtactgctaa

SEQ ID NO: 291 - DNA, 2892 bp, synthetic construct
  source 1..2892: mol_type = other DNA
atggccttaccagtgaccgccttgctcctgccgctggccttgctgctccacgccgccaggccgcaggtgcagctggtgcagtctggggctgaggtgaagaagcctggggcctcagtgaaggtctcctgcaaggcttctggatacaccttcaccgagaatgagatgcactgggtgcgacaggcccctggacaagggcttgagtggatgggatggatcaacccgaacagtggtggcacaaactatgcacagaagtttcagggcagggtcaccatgaccagggacacgtccactagcacagtgtacatggagctgagctctctgagatctgaagacacggccgtgtattactgtgcggggagctggggtggttactactttgactactggggccaagggaccctggtcaccgtctcctcaggtggaggcggttcaggcggaggtggctctggcggtggcggatcggacatccagatgacccagtctccatcctccctgtctgcatctgtaggagacagagtcaccatcacttgccgggcaagtcagagcgttagcagatatttaaattggtatcagcagaaaccagggaaagcccctaagctcctgatctatgatgcatccaatttggaaaccggggtcccatcaaggttcagtggcagtggatctgggacagatttcactctcaccatcagcagtctgcaacctgaagattttgcaacttactactgtcaacaggccgacagtttccctgtgacttttggccaggggaccaagctggagatcaaaggtggcggtggctcgggcggtggtgggtcgggtggcggcggatctcaggtgcagctggtgcagtctggggctgaggtgaagaagcctggggcctcagtgaaggtttcctgcaaggcatctggatacaccttcaccagctactatatgcactgggtgcgacaggcccctggacaagggcttgagtggatgggaataatcaaccctagtgacggaggaacaagctacgcagacaagttccagggcagagtcaccatgaccagggacacgtccacgagcacagtctacatggagctgagcagcctgagatctgaggacacggccgtgtattactgtgctagagcgcttgcccccctgggatggggtgacggcatggatgtctggggccaagggacaacagtcaccgtctcttcaggtggaggcggttcaggcggaggtggctctggcggtggcggatcggacatccagatgacccagtctccatcctccctgtctgcatctgtaggagacagagtcaccatcacttgccaggcgagtcaggacattagcaactatttaaattggtatcagcagaaaccagggaaagcccctaagctcctgatctacgatgcatccaatttggaaacaggggtcccatcaaggttcagtggaagtggatctgggacagattttactctcaccatcagcagcctgcagcctgaagatttcgcaacatattactgtcaacagtcatatgatggacctatcaccttcggccaagggacacgactggagattaaaaccacgacgccagcgccgcggccaccaacaccggcgcccaccatcgcgtcgcagcccctgtccctgcgcccagaggcgtgccggccagcggcggggggcgcagtgcacacgagggggctggacttcgcctgtgatatctacatctgggcgcccttggccgggacttgtggggtccttctcctgtcactggttatcaccctttactgccggagggaccagaggctgccccccgatgcccacaagccccctgggggaggcagtttccggacccccatccaagaggagcaggccgacgcccactccaccctggccaagatcagagtgaagttcagcaggagcgcagacgcccccgcgtaccagcagggccagaaccagctctataacgagctcaatctaggacgaagagaggagtacgatgttttggacaagagacgtggccgggaccctgagatggggggaaagccgagaaggaagaaccctcaggaaggcctgtacaatgaactgcagaaagataagatggcggaggcctacagtgagattgggatgaaaggcgagcgccggaggggcaaggggcacgatggcctttaccagggtctcagtacagccaccaaggacacctacgacgcccttcacatgcaggccctgccccctcgcggctctggcgagggaaggggttccctgcttacttgcggcgacgtcgaagagaatcccggtccgatggccctcccagtaactgccctccttttgcccctcgcactccttcttcatgccgctcgccccaactgggtcaacgtgattagcgatttgaagaaaatcgaggaccttatacagtctatgcatattgacgctacactgtatactgagagtgatgtacacccgtcctgtaaggtaacggccatgaaatgctttcttctggagctccaggtcatcagcttggagtctggggacgcaagcatccacgatacggttgaaaacctcatcatccttgcgaacaactctctctcatctaatggaaacgttacagagagtgggtgtaaggagtgcgaagagttggaagaaaaaaacatcaaagaatttcttcaatccttcgttcacatagtgcaaatgttcattaacacgtccactaccacacccgccccgaggccacctacgccggcaccgactatcgccagtcaacccctctctctgcgccccgaggcttgccggcctgcggctggtggggcggtccacacccggggcctggattttgcgtgcgatatatacatctgggcacctcttgccggcacctgcggagtgctgcttctctcactcgttattacgctgtactgctaa

SEQ ID NO: 292 - protein, 704 aa, synthetic construct
MALPVTALLLPLALLLHAARPQVQLVQSGAEVKKPGASVKVSCKASGYTFTGHYLHWVRQAPGQGLEWMGWINPNSGGTNYAQKFQGRVTMTRDTSTSTVYMELSSLRSEDTAVYYCVRGSGWYDLDYWGQGTLVTVSSGGGGSGGGGSGGGGSDIQMTQSPSSLSASVGDRVTITCRASQNIGTYLAWYQQKPGKAPKLLIYDASNLETGVPSRFSGSGSGTDFTLTISSLQPEDFATYYCQQSYRIPLTFGQGTRLEIKTTTPAPRPPTPAPTIASQPLSLRPEACRPAAGGAVHTRGLDFACDIYIWAPLAGTCGVLLLSLVITLYCRRDQRLPPDAHKPPGGGSFRTPIQEEQADAHSTLAKIRVKFSRSADAPAYQQGQNQLYNELNLGRREEYDVLDKRRGRDPEMGGKPRRKNPQEGLYNELQKDKMAEAYSEIGMKGERRRGKGHDGLYQGLSTATKDTYDALHMQALPPRGSGEGRGSLLTCGDVEENPGPMALPVTALLLPLALLLHAARPNWVNVISDLKKIEDLIQSMHIDATLYTESDVHPSCKVTAMKCFLLELQVISLESGDASIHDTVENLIILANNSLSSNGNVTESGCKECEELEEKNIKEFLQSFVHIVQMFINTSTTTPAPRPPTPAPTIASQPLSLRPEACRPAAGGAVHTRGLDFACDIYIWAPLAGTCGVLLLSLVITLYC

SEQ ID NO: 293 - protein, 705 aa, synthetic construct
MALPVTALLLPLALLLHAARPQVQLVQSGAEVKKPGASVKVSCKASGYTFTNYYMHWVRQAPGQGLEWMGIINPSGGSTSYAQKFQGRVTMTRDTSTSTVYMELSSLRSEDTAVYYCARELGVAGYFDLWGRGTLVTVSSGGGGSGGGGSGGGGSDIQMTQSPSSLSASVGDRVTITCRASQRISNWLAWYQQKPGKAPKLLIYDASNLETGVPSRFSGSGSGTDFTLTISSLQPEDFATYYCQQTYSPPPTFGQGTKLEIKTTTPAPRPPTPAPTIASQPLSLRPEACRPAAGGAVHTRGLDFACDIYIWAPLAGTCGVLLLSLVITLYCRRDQRLPPDAHKPPGGGSFRTPIQEEQADAHSTLAKIRVKFSRSADAPAYQQGQNQLYNELNLGRREEYDVLDKRRGRDPEMGGKPRRKNPQEGLYNELQKDKMAEAYSEIGMKGERRRGKGHDGLYQGLSTATKDTYDALHMQALPPRGSGEGRGSLLTCGDVEENPGPMALPVTALLLPLALLLHAARPNWVNVISDLKKIEDLIQSMHIDATLYTESDVHPSCKVTAMKCFLLELQVISLESGDASIHDTVENLIILANNSLSSNGNVTESGCKECEELEEKNIKEFLQSFVHIVQMFINTSTTTPAPRPPTPAPTIASQPLSLRPEACRPAAGGAVHTRGLDFACDIYIWAPLAGTCGVLLLSLVITLYC

SEQ ID NO: 294 - protein, 714 aa, synthetic construct
MALPVTALLLPLALLLHAARPQVQLVQSGAEVKKPGASVKVSCKASGYTFTGYYIHWVRQAPGQGLEWMGIINPSGGSTSYAQKFQGRVTMTRDTSTSTVYMELSSLRSEDTAVYYCARDLSGIDGYIGFFDYWGQGTLVTVSSGGGGSGGGGSGGGGSDIVMTQSPLSLPVTPGEPASISCRSSQSLLHSNGYNYLDWYLQKPGQSPQLLIYAASSLQSGVPDRFSGSGSGTDFTLKISRVEAEDVGVYYCMQALQTPITFGQGTRLEIKTTTPAPRPPTPAPTIASQPLSLRPEACRPAAGGAVHTRGLDFACDIYIWAPLAGTCGVLLLSLVITLYCRRDQRLPPDAHKPPGGGSFRTPIQEEQADAHSTLAKIRVKFSRSADAPAYQQGQNQLYNELNLGRREEYDVLDKRRGRDPEMGGKPRRKNPQEGLYNELQKDKMAEAYSEIGMKGERRRGKGHDGLYQGLSTATKDTYDALHMQALPPRGSGEGRGSLLTCGDVEENPGPMALPVTALLLPLALLLHAARPNWVNVISDLKKIEDLIQSMHIDATLYTESDVHPSCKVTAMKCFLLELQVISLESGDASIHDTVENLIILANNSLSSNGNVTESGCKECEELEEKNIKEFLQSFVHIVQMFINTSTTTPAPRPPTPAPTIASQPLSLRPEACRPAAGGAVHTRGLDFACDIYIWAPLAGTCGVLLLSLVITLYC

SEQ ID NO: 295 - protein, 705 aa, synthetic construct
MALPVTALLLPLALLLHAARPQVQLVQSGAEVKKPGASVKVSCKASGGTFRSHVISWVRQAPGQGLEWMGIIDPSGGSTSYAQRFQGRVTMTRDTSTSTVYMELSSLRSEDTAVYYCAKDYTGLLGMDVWGQGTTVTVSSGGGGSGGGGSGGGGSDIQMTQSPSSLSASVGDRVTITCRASQDIDTYLAWYQQKPGKAPKLLIYAASSLQSGVPSRFSGSGSGTDFTLTISSLQPEDFATYYCQQSYTTPFTFGQGTKVEIKTTTPAPRPPTPAPTIASQPLSLRPEACRPAAGGAVHTRGLDFACDIYIWAPLAGTCGVLLLSLVITLYCRRDQRLPPDAHKPPGGGSFRTPIQEEQADAHSTLAKIRVKFSRSADAPAYQQGQNQLYNELNLGRREEYDVLDKRRGRDPEMGGKPRRKNPQEGLYNELQKDKMAEAYSEIGMKGERRRGKGHDGLYQGLSTATKDTYDALHMQALPPRGSGEGRGSLLTCGDVEENPGPMALPVTALLLPLALLLHAARPNWVNVISDLKKIEDLIQSMHIDATLYTESDVHPSCKVTAMKCFLLELQVISLESGDASIHDTVENLIILANNSLSSNGNVTESGCKECEELEEKNIKEFLQSFVHIVQMFINTSTTTPAPRPPTPAPTIASQPLSLRPEACRPAAGGAVHTRGLDFACDIYIWAPLAGTCGVLLLSLVITLYC

SEQ ID NO: 296 - protein, 705 aa, synthetic construct
MALPVTALLLPLALLLHAARPQVQLVQSGAEVKKPGASVKVSCKASGYTFIDYYIHWVRQAPGQGLEWMGWMNPNSGNTGYAQKFQGRVTMTRDTSTSTVYMELSSLRSEDTAVYYCARGLSGYDLDDYWGQGTLVTVSSGGGGSGGGGSGGGGSDIQMTQSPSSLSASVGDRVTITCQASQDISNYLNWYQQKPGKAPKLLIYDASSLESGVPSRFSGSGSGTDFTLTISSLQPEDFATYYCQQSYRSPLTFGGGTKVEIKTTTPAPRPPTPAPTIASQPLSLRPEACRPAAGGAVHTRGLDFACDIYIWAPLAGTCGVLLLSLVITLYCRRDQRLPPDAHKPPGGGSFRTPIQEEQADAHSTLAKIRVKFSRSADAPAYQQGQNQLYNELNLGRREEYDVLDKRRGRDPEMGGKPRRKNPQEGLYNELQKDKMAEAYSEIGMKGERRRGKGHDGLYQGLSTATKDTYDALHMQALPPRGSGEGRGSLLTCGDVEENPGPMALPVTALLLPLALLLHAARPNWVNVISDLKKIEDLIQSMHIDATLYTESDVHPSCKVTAMKCFLLELQVISLESGDASIHDTVENLIILANNSLSSNGNVTESGCKECEELEEKNIKEFLQSFVHIVQMFINTSTTTPAPRPPTPAPTIASQPLSLRPEACRPAAGGAVHTRGLDFACDIYIWAPLAGTCGVLLLSLVITLYC

SEQ ID NO: 297 - protein, 704 aa, synthetic construct
MALPVTALLLPLALLLHAARPQVQLVQSGAEVKKPGASVKVSCKASGYTFTSYYMHWVRQAPGQGLEWMGWINPNSGGTKYAHKFQGRVTMTRDTSTSTVYMELSSLRSEDTAVYYCARGLSGYDFDYWGQGTTVTVSSGGGGSGGGGSGGGGSDIQMTQSPSSLSASVGDRVTITCQASQDISNYLNWYQQKPGKAPKLLIYDASNLETGVPSRFSGSGSGTDFTLTISSLQPEDFATYYCQQAYRWPITFGQGTRLEIKTTTPAPRPPTPAPTIASQPLSLRPEACRPAAGGAVHTRGLDFACDIYIWAPLAGTCGVLLLSLVITLYCRRDQRLPPDAHKPPGGGSFRTPIQEEQADAHSTLAKIRVKFSRSADAPAYQQGQNQLYNELNLGRREEYDVLDKRRGRDPEMGGKPRRKNPQEGLYNELQKDKMAEAYSEIGMKGERRRGKGHDGLYQGLSTATKDTYDALHMQALPPRGSGEGRGSLLTCGDVEENPGPMALPVTALLLPLALLLHAARPNWVNVISDLKKIEDLIQSMHIDATLYTESDVHPSCKVTAMKCFLLELQVISLESGDASIHDTVENLIILANNSLSSNGNVTESGCKECEELEEKNIKEFLQSFVHIVQMFINTSTTTPAPRPPTPAPTIASQPLSLRPEACRPAAGGAVHTRGLDFACDIYIWAPLAGTCGVLLLSLVITLYC

SEQ ID NO: 298 - protein, 705 aa, synthetic construct
MALPVTALLLPLALLLHAARPQVQLVQSGAEVKKPGASVKVSCKASGYTFTGYYMHWVRQAPGQGLEWMGWMNPNSGNTGYAQKFQGRVTMTRDTSTSTVYMELSSLRSEDTAVYYCARGTDVYGDFDYWGQGTLVTVSSGGGGSGGGGSGGGGSDIQMTQSPSSLSASVGDRVTITCRASQSISSYLNWYQQKPGKAPKLLIYDASYLETGVPSRFSGSGSGTDFTLTISSLQPEDFATYYCQQSYTIPPTFGQGTKVEIKTTTPAPRPPTPAPTIASQPLSLRPEACRPAAGGAVHTRGLDFACDIYIWAPLAGTCGVLLLSLVITLYCRRDQRLPPDAHKPPGGGSFRTPIQEEQADAHSTLAKIRVKFSRSADAPAYQQGQNQLYNELNLGRREEYDVLDKRRGRDPEMGGKPRRKNPQEGLYNELQKDKMAEAYSEIGMKGERRRGKGHDGLYQGLSTATKDTYDALHMQALPPRGSGEGRGSLLTCGDVEENPGPMALPVTALLLPLALLLHAARPNWVNVISDLKKIEDLIQSMHIDATLYTESDVHPSCKVTAMKCFLLELQVISLESGDASIHDTVENLIILANNSLSSNGNVTESGCKECEELEEKNIKEFLQSFVHIVQMFINTSTTTPAPRPPTPAPTIASQPLSLRPEACRPAAGGAVHTRGLDFACDIYIWAPLAGTCGVLLLSLVITLYC

SEQ ID NO: 299 - protein, 712 aa, synthetic construct
MALPVTALLLPLALLLHAARPQVQLVQSGAEVKKPGSSVKVSCKASGYTFTENEMHWVRQAPGQGLEWMGGIIPIFGTANYAQKFQGRVTITADESTSTAYMELSSLRSEDTAVYYCAREGGTAMATGYYYYGMDVWGQGTTVTVSSGGGGSGGGGSGGGGSDIQMTQSPSSLSASVGDRVTITCQASQDISNYLNWYQQKPGKAPKLLIYDASNLETGVPSRFSGSGSGTDFTLTISSLQPEDFATYYCQQSYSTPLTFGQGTKVEIKTTTPAPRPPTPAPTIASQPLSLRPEACRPAAGGAVHTRGLDFACDIYIWAPLAGTCGVLLLSLVITLYCRRDQRLPPDAHKPPGGGSFRTPIQEEQADAHSTLAKIRVKFSRSADAPAYQQGQNQLYNELNLGRREEYDVLDKRRGRDPEMGGKPRRKNPQEGLYNELQKDKMAEAYSEIGMKGERRRGKGHDGLYQGLSTATKDTYDALHMQALPPRGSGEGRGSLLTCGDVEENPGPMALPVTALLLPLALLLHAARPNWVNVISDLKKIEDLIQSMHIDATLYTESDVHPSCKVTAMKCFLLELQVISLESGDASIHDTVENLIILANNSLSSNGNVTESGCKECEELEEKNIKEFLQSFVHIVQMFINTSTTTPAPRPPTPAPTIASQPLSLRPEACRPAAGGAVHTRGLDFACDIYIWAPLAGTCGVLLLSLVITLYC

SEQ ID NO: 300 - protein, 710 aa, synthetic construct
MALPVTALLLPLALLLHAARPQVQLVQSGAEVKKPGASVKVSCKASGYTFTENEMHWVRQAPGQGLEWMGWINSNGGYTGYALKFQGRVTMTRDTSTSTVYMELSSLRSEDTAVYYCARASNYGGHFDYWGQGTLVTVSSGGGGSGGGGSGGGGSDIVMTQSPLSLPVTPGEPASISCRSSQSLLHSNGYNYLDWYLQKPGQSPQLLIYQASSLESGVPDRFSGSGSGTDFTLKISRVEAEDVGVYYCMQGTHWPPTFGGGTKVEIKTTTPAPRPPTPAPTIASQPLSLRPEACRPAAGGAVHTRGLDFACDIYIWAPLAGTCGVLLLSLVITLYCRRDQRLPPDAHKPPGGGSFRTPIQEEQADAHSTLAKIRVKFSRSADAPAYQQGQNQLYNELNLGRREEYDVLDKRRGRDPEMGGKPRRKNPQEGLYNELQKDKMAEAYSEIGMKGERRRGKGHDGLYQGLSTATKDTYDALHMQALPPRGSGEGRGSLLTCGDVEENPGPMALPVTALLLPLALLLHAARPNWVNVISDLKKIEDLIQSMHIDATLYTESDVHPSCKVTAMKCFLLELQVISLESGDASIHDTVENLIILANNSLSSNGNVTESGCKECEELEEKNIKEFLQSFVHIVQMFINTSTTTPAPRPPTPAPTIASQPLSLRPEACRPAAGGAVHTRGLDFACDIYIWAPLAGTCGVLLLSLVITLYC

SEQ ID NO: 301 - protein, 705 aa, synthetic construct
MALPVTALLLPLALLLHAARPQVQLVQSGAEVKKPGASVKVSCKASGYTFTSYYMHWVRQAPGQGLEWMGIINPSGGSTIYAQKFQGRVTMTRDTSTSTVYMELSSLRSEDTAVYYCAKDMGAWAAGFDYWGQGTLVTVSSGGGGSGGGGSGGGGSDIQMTQSPSSLSASVGDRVTITCQASQDISNYLNWYQQKPGKAPKLLIYATSTLANGVPSRFSGSGSGTDFTLTISSLQPEDFATYYCQQSYSTLTFGQGTRLEIKTTTPAPRPPTPAPTIASQPLSLRPEACRPAAGGAVHTRGLDFACDIYIWAPLAGTCGVLLLSLVITLYCRRDQRLPPDAHKPPGGGSFRTPIQEEQADAHSTLAKIRVKFSRSADAPAYQQGQNQLYNELNLGRREEYDVLDKRRGRDPEMGGKPRRKNPQEGLYNELQKDKMAEAYSEIGMKGERRRGKGHDGLYQGLSTATKDTYDALHMQALPPRGSGEGRGSLLTCGDVEENPGPMALPVTALLLPLALLLHAARPNWVNVISDLKKIEDLIQSMHIDATLYTESDVHPSCKVTAMKCFLLELQVISLESGDASIHDTVENLIILANNSLSSNGNVTESGCKECEELEEKNIKEFLQSFVHIVQMFINTSTTTPAPRPPTPAPTIASQPLSLRPEACRPAAGGAVHTRGLDFACDIYIWAPLAGTCGVLLLSLVITLYC

SEQ ID NO: 302 - protein, 706 aa, synthetic construct
MALPVTALLLPLALLLHAARPQVQLVQSGAEVKKPGASVKVSCKASGYTFTGYYMHWVRQAPGQGLEWMGWINPNSGDTGYAQKFQGRVTMTRDTSTSTVYMELSSLRSEDTAVYYCARSVNDYGDYDGYWGQGTLVTVSSGGGGSGGGGSGGGGSDIQMTQSPSSLSASVGDRVTITCQASQDISNYLNWYQQKPGKAPKLLIYDASNLETGVPSRFSGSGSGTDFTLTISSLQPEDFATYYCQQSYSTPPTFGQGTKVEIKTTTPAPRPPTPAPTIASQPLSLRPEACRPAAGGAVHTRGLDFACDIYIWAPLAGTCGVLLLSLVITLYCRRDQRLPPDAHKPPGGGSFRTPIQEEQADAHSTLAKIRVKFSRSADAPAYQQGQNQLYNELNLGRREEYDVLDKRRGRDPEMGGKPRRKNPQEGLYNELQKDKMAEAYSEIGMKGERRRGKGHDGLYQGLSTATKDTYDALHMQALPPRGSGEGRGSLLTCGDVEENPGPMALPVTALLLPLALLLHAARPNWVNVISDLKKIEDLIQSMHIDATLYTESDVHPSCKVTAMKCFLLELQVISLESGDASIHDTVENLIILANNSLSSNGNVTESGCKECEELEEKNIKEFLQSFVHIVQMFINTSTTTPAPRPPTPAPTIASQPLSLRPEACRPAAGGAVHTRGLDFACDIYIWAPLAGTCGVLLLSLVITLYC

SEQ ID NO: 303 - protein, 706 aa, synthetic construct
MALPVTALLLPLALLLHAARPQVQLVQSGAEVKKPGASVKVSCKASGYTFTGYYMHWVRQAPGQGLEWMGIINPSGGSTSYAQKFQGRVTMTRDTSTSTVYMELSSLRSEDTAVYYCARDYGDYDASFDYWGQGTLVTVSSGGGGSGGGGSGGGGSDIQMTQSPSSLSASVGDRVTITCRASQSIDNWLAWYQQKPGKAPKLLIYAASTLQSGVPSRFSGSGSGTDFTLTISSLQPEDFATYYCQQSYDSPPTFGQGTKLEIKTTTPAPRPPTPAPTIASQPLSLRPEACRPAAGGAVHTRGLDFACDIYIWAPLAGTCGVLLLSLVITLYCRRDQRLPPDAHKPPGGGSFRTPIQEEQADAHSTLAKIRVKFSRSADAPAYQQGQNQLYNELNLGRREEYDVLDKRRGRDPEMGGKPRRKNPQEGLYNELQKDKMAEAYSEIGMKGERRRGKGHDGLYQGLSTATKDTYDALHMQALPPRGSGEGRGSLLTCGDVEENPGPMALPVTALLLPLALLLHAARPNWVNVISDLKKIEDLIQSMHIDATLYTESDVHPSCKVTAMKCFLLELQVISLESGDASIHDTVENLIILANNSLSSNGNVTESGCKECEELEEKNIKEFLQSFVHIVQMFINTSTTTPAPRPPTPAPTIASQPLSLRPEACRPAAGGAVHTRGLDFACDIYIWAPLAGTCGVLLLSLVITLYC

SEQ ID NO: 304 - protein, 703 aa, synthetic construct
MALPVTALLLPLALLLHAARPQVQLVQSGAEVKKPGASVKVSCKASGYTFTSYDINWVRQAPGQGLEWMGIINPSDGSTIYAQNFQGRVTMTRDTSTSTVYMELSSLRSEDTAVYYCVKEEAWYFDLWGRGTLVTVSSGGGGSGGGGSGGGGSDIQMTQSPSSLSASVGDRVTITCQASQDISNYLNWYQQKPGKAPKLLIYDASNLETGVPSRFSGSGSGTDFTLTISSLQPEDFATYYCQQSYSTPLTFGGGTKVEIKTTTPAPRPPTPAPTIASQPLSLRPEACRPAAGGAVHTRGLDFACDIYIWAPLAGTCGVLLLSLVITLYCRRDQRLPPDAHKPPGGGSFRTPIQEEQADAHSTLAKIRVKFSRSADAPAYQQGQNQLYNELNLGRREEYDVLDKRRGRDPEMGGKPRRKNPQEGLYNELQKDKMAEAYSEIGMKGERRRGKGHDGLYQGLSTATKDTYDALHMQALPPRGSGEGRGSLLTCGDVEENPGPMALPVTALLLPLALLLHAARPNWVNVISDLKKIEDLIQSMHIDATLYTESDVHPSCKVTAMKCFLLELQVISLESGDASIHDTVENLIILANNSLSSNGNVTESGCKECEELEEKNIKEFLQSFVHIVQMFINTSTTTPAPRPPTPAPTIASQPLSLRPEACRPAAGGAVHTRGLDFACDIYIWAPLAGTCGVLLLSLVITLYC

SEQ ID NO: 305 - protein, 703 aa, synthetic construct
MALPVTALLLPLALLLHAARPQVQLVQSGAEVKKPGASVKVSCKASGYTFTSYYMHWVRQAPGQGLEWMGWMNPDNGDTGYAQMFQGRVTMTRDTSTSTVYMELSSLRSEDTAVYYCASGDYYDILYWGQGTLVTVSSGGGGSGGGGSGGGGSDIQMTQSPSSLSASVGDRVTITCQASQDISNYLNWYQQKPGKAPKLLIYDVSNLETGVPSRFSGSGSGTDFTLTISSLQPEDFATYYCQQANSFPLTFGGGTKVEIKTTTPAPRPPTPAPTIASQPLSLRPEACRPAAGGAVHTRGLDFACDIYIWAPLAGTCGVLLLSLVITLYCRRDQRLPPDAHKPPGGGSFRTPIQEEQADAHSTLAKIRVKFSRSADAPAYQQGQNQLYNELNLGRREEYDVLDKRRGRDPEMGGKPRRKNPQEGLYNELQKDKMAEAYSEIGMKGERRRGKGHDGLYQGLSTATKDTYDALHMQALPPRGSGEGRGSLLTCGDVEENPGPMALPVTALLLPLALLLHAARPNWVNVISDLKKIEDLIQSMHIDATLYTESDVHPSCKVTAMKCFLLELQVISLESGDASIHDTVENLIILANNSLSSNGNVTESGCKECEELEEKNIKEFLQSFVHIVQMFINTSTTTPAPRPPTPAPTIASQPLSLRPEACRPAAGGAVHTRGLDFACDIYIWAPLAGTCGVLLLSLVITLYC

SEQ ID NO: 306 - protein, 704 aa, synthetic construct
MALPVTALLLPLALLLHAARPQVQLVQSGAEVKKPGASVKVSCKASGYTFTSYYMHWVRQAPGQGLEWMGWMNPNSGDTGYAQKFQGRVTMTRDTSTSTVYMELSSLRSEDTAVYYCARGPSGYEFDYWGQGTLVTVSSGGGGSGGGGSGGGGSDIQMTQSPSSLSASVGDRVTITCRASQTISNYLNWYQQKPGKAPKLLIYDASSLESGVPSRFSGSGSGTDFTLTISSLQPEDFATYYCQQAISFPLTFGGGTKVEIKTTTPAPRPPTPAPTIASQPLSLRPEACRPAAGGAVHTRGLDFACDIYIWAPLAGTCGVLLLSLVITLYCRRDQRLPPDAHKPPGGGSFRTPIQEEQADAHSTLAKIRVKFSRSADAPAYQQGQNQLYNELNLGRREEYDVLDKRRGRDPEMGGKPRRKNPQEGLYNELQKDKMAEAYSEIGMKGERRRGKGHDGLYQGLSTATKDTYDALHMQALPPRGSGEGRGSLLTCGDVEENPGPMALPVTALLLPLALLLHAARPNWVNVISDLKKIEDLIQSMHIDATLYTESDVHPSCKVTAMKCFLLELQVISLESGDASIHDTVENLIILANNSLSSNGNVTESGCKECEELEEKNIKEFLQSFVHIVQMFINTSTTTPAPRPPTPAPTIASQPLSLRPEACRPAAGGAVHTRGLDFACDIYIWAPLAGTCGVLLLSLVITLYC

SEQ ID NO: 307 - protein, 708 aa, synthetic construct
MALPVTALLLPLALLLHAARPQVQLVQSGAEVKKPGASVKVSCKASGYTFTDYYMHWVRQAPGQGLEWMGIINPNSGGTNYAQKFQGRVTMTRDTSTSTVYMELSSLRSEDTAVYYCARDFSVYAAADGMDVWGQGTLVTVSSGGGGSGGGGSGGGGSDIQMTQSPSSLSASVGDRVTITCRASQSISSYLNWYQQKPGKAPKLLIYDASNLATGVPSRFSGSGSGTDFTLTISSLQPEDFATYYCQQSDSSPLTFGQGTKVEIKTTTPAPRPPTPAPTIASQPLSLRPEACRPAAGGAVHTRGLDFACDIYIWAPLAGTCGVLLLSLVITLYCRRDQRLPPDAHKPPGGGSFRTPIQEEQADAHSTLAKIRVKFSRSADAPAYQQGQNQLYNELNLGRREEYDVLDKRRGRDPEMGGKPRRKNPQEGLYNELQKDKMAEAYSEIGMKGERRRGKGHDGLYQGLSTATKDTYDALHMQALPPRGSGEGRGSLLTCGDVEENPGPMALPVTALLLPLALLLHAARPNWVNVISDLKKIEDLIQSMHIDATLYTESDVHPSCKVTAMKCFLLELQVISLESGDASIHDTVENLIILANNSLSSNGNVTESGCKECEELEEKNIKEFLQSFVHIVQMFINTSTTTPAPRPPTPAPTIASQPLSLRPEACRPAAGGAVHTRGLDFACDIYIWAPLAGTCGVLLLSLVITLYC

SEQ ID NO: 308 - protein, 707 aa, synthetic construct
MALPVTALLLPLALLLHAARPQVQLVQSGAEVKKPGASVKVSCKASGYTFTGYYMHWVRQAPGQGLEWMGIINPGDGGTIYAQNFQGRVTMTRDTSTSTVYMELSSLRSEDTAVYYCARGFGESAPDAFDIWGQGTMVTVSSGGGGSGGGGSGGGGSDIQMTQSPSSLSASVGDRVTITCQASQDISNYLNWYQQKPGKAPKLLIYGATTLQSGVPSRFSGSGSGTDFTLTISSLQPEDFATYYCQQADSFPYTFGQGTKLEIKTTTPAPRPPTPAPTIASQPLSLRPEACRPAAGGAVHTRGLDFACDIYIWAPLAGTCGVLLLSLVITLYCRRDQRLPPDAHKPPGGGSFRTPIQEEQADAHSTLAKIRVKFSRSADAPAYQQGQNQLYNELNLGRREEYDVLDKRRGRDPEMGGKPRRKNPQEGLYNELQKDKMAEAYSEIGMKGERRRGKGHDGLYQGLSTATKDTYDALHMQALPPRGSGEGRGSLLTCGDVEENPGPMALPVTALLLPLALLLHAARPNWVNVISDLKKIEDLIQSMHIDATLYTESDVHPSCKVTAMKCFLLELQVISLESGDASIHDTVENLIILANNSLSSNGNVTESGCKECEELEEKNIKEFLQSFVHIVQMFINTSTTTPAPRPPTPAPTIASQPLSLRPEACRPAAGGAVHTRGLDFACDIYIWAPLAGTCGVLLLSLVITLYC

SEQ ID NO: 309 - protein, 704 aa, synthetic construct
MALPVTALLLPLALLLHAARPQVQLVQSGAEVKKPGASVKVSCKASGYTFTGYYMHWVRQAPGQGLEWMGIINPSGGSTSYAQKFQGRVTMTRDTSTSTVYMELSSLRSEDTAVYYCAAGTEIYYMDVWGKGTTVTVSSGGGGSGGGGSGGGGSDIQMTQSPSSLSASVGDRVTITCRASQTIDIYLNWYQQKPGKAPKLLIYDASNLETGVPSRFSGSGSGTDFTLTISSLQPEDFATYYCQQADSFPLTFGGGTKVEIKTTTPAPRPPTPAPTIASQPLSLRPEACRPAAGGAVHTRGLDFACDIYIWAPLAGTCGVLLLSLVITLYCRRDQRLPPDAHKPPGGGSFRTPIQEEQADAHSTLAKIRVKFSRSADAPAYQQGQNQLYNELNLGRREEYDVLDKRRGRDPEMGGKPRRKNPQEGLYNELQKDKMAEAYSEIGMKGERRRGKGHDGLYQGLSTATKDTYDALHMQALPPRGSGEGRGSLLTCGDVEENPGPMALPVTALLLPLALLLHAARPNWVNVISDLKKIEDLIQSMHIDATLYTESDVHPSCKVTAMKCFLLELQVISLESGDASIHDTVENLIILANNSLSSNGNVTESGCKECEELEEKNIKEFLQSFVHIVQMFINTSTTTPAPRPPTPAPTIASQPLSLRPEACRPAAGGAVHTRGLDFACDIYIWAPLAGTCGVLLLSLVITLYC

SEQ ID NO: 310 - protein, 713 aa, synthetic construct
MALPVTALLLPLALLLHAARPQVQLVQSGAEVKKPGASVKVSCKASGGTFSSYAISWVRQAPGQGLEWMGMINPSDGATTYAQKFQGRVTMTRDTSTSTVYMELSSLRSEDTAVYYCARERELLHFATNYYYYGMDVWGQGTTVTVSSGGGGSGGGGSGGGGSDIQMTQSPSSLSASVGDRVTITCRASQGISNNLNWYQQKPGKAPKLLIYAASSLHSGVPSRFSGSGSGTDFTLTISSLQPEDFATYYCQQADAFPLTFGGGTKVEIKTTTPAPRPPTPAPTIASQPLSLRPEACRPAAGGAVHTRGLDFACDIYIWAPLAGTCGVLLLSLVITLYCRRDQRLPPDAHKPPGGGSFRTPIQEEQADAHSTLAKIRVKFSRSADAPAYQQGQNQLYNELNLGRREEYDVLDKRRGRDPEMGGKPRRKNPQEGLYNELQKDKMAEAYSEIGMKGERRRGKGHDGLYQGLSTATKDTYDALHMQALPPRGSGEGRGSLLTCGDVEENPGPMALPVTALLLPLALLLHAARPNWVNVISDLKKIEDLIQSMHIDATLYTESDVHPSCKVTAMKCFLLELQVISLESGDASIHDTVENLIILANNSLSSNGNVTESGCKECEELEEKNIKEFLQSFVHIVQMFINTSTTTPAPRPPTPAPTIASQPLSLRPEACRPAAGGAVHTRGLDFACDIYIWAPLAGTCGVLLLSLVITLYC

SEQ ID NO: 311 - protein, 709 aa, synthetic construct
MALPVTALLLPLALLLHAARPQVQLVQSGAEVKKPGASVKVSCKASGYTFTRNYMHWVRQAPGQGLEWMGWISPDNGVTNYAQNFQGRVTMTRDTSTSTVYMELSSLRSEDTAVYYCAKTQGSSSWYQWYFDLWGRGTLVTVSSGGGGSGGGGSGGGGSDIQMTQSPSSLSASVGDRVTITCRASQSIGTWLAWYQQKPGKAPKLLIYAASSLQSGVPSRFSGSGSGTDFTLTISSLQPEDFATYYCQQSYTTPITFGQGTKVEIKTTTPAPRPPTPAPTIASQPLSLRPEACRPAAGGAVHTRGLDFACDIYIWAPLAGTCGVLLLSLVITLYCRRDQRLPPDAHKPPGGGSFRTPIQEEQADAHSTLAKIRVKFSRSADAPAYQQGQNQLYNELNLGRREEYDVLDKRRGRDPEMGGKPRRKNPQEGLYNELQKDKMAEAYSEIGMKGERRRGKGHDGLYQGLSTATKDTYDALHMQALPPRGSGEGRGSLLTCGDVEENPGPMALPVTALLLPLALLLHAARPNWVNVISDLKKIEDLIQSMHIDATLYTESDVHPSCKVTAMKCFLLELQVISLESGDASIHDTVENLIILANNSLSSNGNVTESGCKECEELEEKNIKEFLQSFVHIVQMFINTSTTTPAPRPPTPAPTIASQPLSLRPEACRPAAGGAVHTRGLDFACDIYIWAPLAGTCGVLLLSLVITLYC

SEQ ID NO: 312 - protein, 705 aa, synthetic construct
MALPVTALLLPLALLLHAARPQVQLVQSGAEVKKPGASVKVSCKASGYTFTSYYMHWVRQAPGQGLEWMGIIDPGSGDTSYAQKFQGRVTMTRDTSTSTVYMELSSLRSEDTAVYYCARGSNWYDYFDYWGQGTLVTVSSGGGGSGGGGSGGGGSEIVMTQSPATLSVSPGERATLSCRASQSVSSYLAWYQQKPGQAPRLLIYGASTRATGIPARFSGSGSGTEFTLTISSLQSEDFAVYYCQQYDSYPPTFGGGTKVEIKTTTPAPRPPTPAPTIASQPLSLRPEACRPAAGGAVHTRGLDFACDIYIWAPLAGTCGVLLLSLVITLYCRRDQRLPPDAHKPPGGGSFRTPIQEEQADAHSTLAKIRVKFSRSADAPAYQQGQNQLYNELNLGRREEYDVLDKRRGRDPEMGGKPRRKNPQEGLYNELQKDKMAEAYSEIGMKGERRRGKGHDGLYQGLSTATKDTYDALHMQALPPRGSGEGRGSLLTCGDVEENPGPMALPVTALLLPLALLLHAARPNWVNVISDLKKIEDLIQSMHIDATLYTESDVHPSCKVTAMKCFLLELQVISLESGDASIHDTVENLIILANNSLSSNGNVTESGCKECEELEEKNIKEFLQSFVHIVQMFINTSTTTPAPRPPTPAPTIASQPLSLRPEACRPAAGGAVHTRGLDFACDIYIWAPLAGTCGVLLLSLVITLYC

SEQ ID NO: 313 - protein, 705 aa, synthetic construct
MALPVTALLLPLALLLHAARPQVQLVQSGAEVKKPGASVKVSCKASGYRLSDHYMHWVRQAPGQGLEWMGIINPSGGSTTYAQNFQGRVTMTRDTSTSTVYMELSSLRSEDTAVYYCASSYYGDYVLVNWGQGTLVTVSSGGGGSGGGGSGGGGSDIQMTQSPSSLSASVGDRVTITCQASQDISNYLNWYQQKPGKAPKLLIYAASTLESGVPSRFSGSGSGTDFTLTISSLQPEDFATYYCLQDYDYPLTFGQGTKLEIKTTTPAPRPPTPAPTIASQPLSLRPEACRPAAGGAVHTRGLDFACDIYIWAPLAGTCGVLLLSLVITLYCRRDQRLPPDAHKPPGGGSFRTPIQEEQADAHSTLAKIRVKFSRSADAPAYQQGQNQLYNELNLGRREEYDVLDKRRGRDPEMGGKPRRKNPQEGLYNELQKDKMAEAYSEIGMKGERRRGKGHDGLYQGLSTATKDTYDALHMQALPPRGSGEGRGSLLTCGDVEENPGPMALPVTALLLPLALLLHAARPNWVNVISDLKKIEDLIQSMHIDATLYTESDVHPSCKVTAMKCFLLELQVISLESGDASIHDTVENLIILANNSLSSNGNVTESGCKECEELEEKNIKEFLQSFVHIVQMFINTSTTTPAPRPPTPAPTIASQPLSLRPEACRPAAGGAVHTRGLDFACDIYIWAPLAGTCGVLLLSLVITLYC

SEQ ID NO: 314 - protein, 706 aa, synthetic construct
MALPVTALLLPLALLLHAARPQVQLVQSGAEVKKPGASVKVSCKASGYTFTDYYVHWVRQAPGQGLEWMGWINPNTGGTSFAQNFQGRVTMTRDTSTSTVYMELSSLRSEDTAVYYCARDLGQWLGEIDYWGQGTLVTVSSGGGGSGGGGSGGGGSDIQMTQSPSSLSASVGDRVTITCRASQTIYKWLAWYQQKPGKAPKLLIYDASSLESGVPSRFSGSGSGTDFTLTISSLQPEDFATYYCQQANSFPFTFGPGTKVDIKTTTPAPRPPTPAPTIASQPLSLRPEACRPAAGGAVHTRGLDFACDIYIWAPLAGTCGVLLLSLVITLYCRRDQRLPPDAHKPPGGGSFRTPIQEEQADAHSTLAKIRVKFSRSADAPAYQQGQNQLYNELNLGRREEYDVLDKRRGRDPEMGGKPRRKNPQEGLYNELQKDKMAEAYSEIGMKGERRRGKGHDGLYQGLSTATKDTYDALHMQALPPRGSGEGRGSLLTCGDVEENPGPMALPVTALLLPLALLLHAARPNWVNVISDLKKIEDLIQSMHIDATLYTESDVHPSCKVTAMKCFLLELQVISLESGDASIHDTVENLIILANNSLSSNGNVTESGCKECEELEEKNIKEFLQSFVHIVQMFINTSTTTPAPRPPTPAPTIASQPLSLRPEACRPAAGGAVHTRGLDFACDIYIWAPLAGTCGVLLLSLVITLYC

SEQ ID NO: 315 - protein, 710 aa, synthetic construct
MALPVTALLLPLALLLHAARPQVQLVQSGAEVKKPGASVKVSCKASGYTFTDYTDYFVHWVRQAPGQGLEWMGIFNPSDGSTSYAQEFQGRVTMTRDTSTSTVYMELSSLRSEDTAVYYCARGPYSSSWYYFDYWGQGTLVTVSSGGGGSGGGGSGGGGSDIQMTQSPSSLSASVGDRVTITCQASQDISNYLNWYQQKPGKAPKLLIYDASNLETGVPSRFSGSGSGTDFTLTISSLQPEDFATYYCQQAHSFPPTFGQGTKVEIKTTTPAPRPPTPAPTIASQPLSLRPEACRPAAGGAVHTRGLDFACDIYIWAPLAGTCGVLLLSLVITLYCRRDQRLPPDAHKPPGGGSFRTPIQEEQADAHSTLAKIRVKFSRSADAPAYQQGQNQLYNELNLGRREEYDVLDKRRGRDPEMGGKPRRKNPQEGLYNELQKDKMAEAYSEIGMKGERRRGKGHDGLYQGLSTATKDTYDALHMQALPPRGSGEGRGSLLTCGDVEENPGPMALPVTALLLPLALLLHAARPNWVNVISDLKKIEDLIQSMHIDATLYTESDVHPSCKVTAMKCFLLELQVISLESGDASIHDTVENLIILANNSLSSNGNVTESGCKECEELEEKNIKEFLQSFVHIVQMFINTSTTTPAPRPPTPAPTIASQPLSLRPEACRPAAGGAVHTRGLDFACDIYIWAPLAGTCGVLLLSLVITLYC

SEQ ID NO: 316 - protein, 706 aa, synthetic construct
MALPVTALLLPLALLLHAARPQVQLVQSGAEVKKPGASVKVSCKASGYIFTDYYMHWVRQAPGQGLEWMGIINPSGGDTLYAQKFQGRVTMTRDTSTSTVYMELSSLRSEDTAVYYCAREGVGAMGVFDYWGQGTLVTVSSGGGGSGGGGSGGGGSDIQMTQSPSSLSASVGDRVTITCRASTSISDYVHWYQQKPGKAPKLLIYDASSLQSGVPSRFSGSGSGTDFTLTISSLQPEDFATYYCQQSDSTPPTFGGGTKVEIKTTTPAPRPPTPAPTIASQPLSLRPEACRPAAGGAVHTRGLDFACDIYIWAPLAGTCGVLLLSLVITLYCRRDQRLPPDAHKPPGGGSFRTPIQEEQADAHSTLAKIRVKFSRSADAPAYQQGQNQLYNELNLGRREEYDVLDKRRGRDPEMGGKPRRKNPQEGLYNELQKDKMAEAYSEIGMKGERRRGKGHDGLYQGLSTATKDTYDALHMQALPPRGSGEGRGSLLTCGDVEENPGPMALPVTALLLPLALLLHAARPNWVNVISDLKKIEDLIQSMHIDATLYTESDVHPSCKVTAMKCFLLELQVISLESGDASIHDTVENLIILANNSLSSNGNVTESGCKECEELEEKNIKEFLQSFVHIVQMFINTSTTTPAPRPPTPAPTIASQPLSLRPEACRPAAGGAVHTRGLDFACDIYIWAPLAGTCGVLLLSLVITLYC

SEQ ID NO: 317 - protein, 708 aa, synthetic construct
MALPVTALLLPLALLLHAARPQVQLVQSGAEVKKPGASVKVSCKASGYTFTDHYIHWVRQAPGQGLEWMGWISAYNGKTNYAQKFQGRVTMTRDTSTSTVYMELSSLRSEDTAVYYCARDTIYYDFWSGYDYWGQGTLVTVSSGGGGSGGGGSGGGGSDIQMTQSPSSLSASVGDRVTITCRASQGISNNLNWYQQKPGKAPKLLIYYASTLQSGVPSRFSGSGSGTDFTLTISSLQPEDFATYYCQQSYSTPITFGQGTRLEIKTTTPAPRPPTPAPTIASQPLSLRPEACRPAAGGAVHTRGLDFACDIYIWAPLAGTCGVLLLSLVITLYCRRDQRLPPDAHKPPGGGSFRTPIQEEQADAHSTLAKIRVKFSRSADAPAYQQGQNQLYNELNLGRREEYDVLDKRRGRDPEMGGKPRRKNPQEGLYNELQKDKMAEAYSEIGMKGERRRGKGHDGLYQGLSTATKDTYDALHMQALPPRGSGEGRGSLLTCGDVEENPGPMALPVTALLLPLALLLHAARPNWVNVISDLKKIEDLIQSMHIDATLYTESDVHPSCKVTAMKCFLLELQVISLESGDASIHDTVENLIILANNSLSSNGNVTESGCKECEELEEKNIKEFLQSFVHIVQMFINTSTTTPAPRPPTPAPTIASQPLSLRPEACRPAAGGAVHTRGLDFACDIYIWAPLAGTCGVLLLSLVITLYC

SEQ ID NO: 318 - protein, 708 aa, synthetic construct
MALPVTALLLPLALLLHAARPQVQLVQSGAEVKKPGASVKVSCKASGYTFTSYYMHWVRQAPGQGLEWMGIINPSGGATIYAQKFQGRVTMTRDTSTSTVYMELSSLRSEDTAVYYCARSRGDYYGSGDFDYWGQGTLVTVSSGGGGSGGGGSGGGGSDIQMTQSPSSLSASVGDRVTITCRASQTISNYLNWYQQKPGKAPKLLIYDASTLEAGVPSRFSGSGSGTDFTLTISSLQPEDFATYYCQQSYNPPYTFGQGTKLEIKTTTPAPRPPTPAPTIASQPLSLRPEACRPAAGGAVHTRGLDFACDIYIWAPLAGTCGVLLLSLVITLYCRRDQRLPPDAHKPPGGGSFRTPIQEEQADAHSTLAKIRVKFSRSADAPAYQQGQNQLYNELNLGRREEYDVLDKRRGRDPEMGGKPRRKNPQEGLYNELQKDKMAEAYSEIGMKGERRRGKGHDGLYQGLSTATKDTYDALHMQALPPRGSGEGRGSLLTCGDVEENPGPMALPVTALLLPLALLLHAARPNWVNVISDLKKIEDLIQSMHIDATLYTESDVHPSCKVTAMKCFLLELQVISLESGDASIHDTVENLIILANNSLSSNGNVTESGCKECEELEEKNIKEFLQSFVHIVQMFINTSTTTPAPRPPTPAPTIASQPLSLRPEACRPAAGGAVHTRGLDFACDIYIWAPLAGTCGVLLLSLVITLYC

SEQ ID NO: 319 - protein, 704 aa, synthetic construct
MALPVTALLLPLALLLHAARPQVQLVQSGAEVKKPGASVKVSCKASGYTFTDYYMHWVRQAPGQGLEWMGIINPSGGSTSYAQKFQGRVTMTRDTSTSTVYMELSSLRSEDTAVYYCARGYFDHAFDIWGQGTMVTVSSGGGGSGGGGSGGGGSDIQMTQSPSSLSASVGDRVTITCRASQSISTYLNWYQQKPGKAPKLLIYDASNLEIGVPSRFSGSGSGTDFTLTISSLQPEDFATYYCQQSDSSPLTFGQGTKVEIKTTTPAPRPPTPAPTIASQPLSLRPEACRPAAGGAVHTRGLDFACDIYIWAPLAGTCGVLLLSLVITLYCRRDQRLPPDAHKPPGGGSFRTPIQEEQADAHSTLAKIRVKFSRSADAPAYQQGQNQLYNELNLGRREEYDVLDKRRGRDPEMGGKPRRKNPQEGLYNELQKDKMAEAYSEIGMKGERRRGKGHDGLYQGLSTATKDTYDALHMQALPPRGSGEGRGSLLTCGDVEENPGPMALPVTALLLPLALLLHAARPNWVNVISDLKKIEDLIQSMHIDATLYTESDVHPSCKVTAMKCFLLELQVISLESGDASIHDTVENLIILANNSLSSNGNVTESGCKECEELEEKNIKEFLQSFVHIVQMFINTSTTTPAPRPPTPAPTIASQPLSLRPEACRPAAGGAVHTRGLDFACDIYIWAPLAGTCGVLLLSLVITLYC

SEQ ID NO: 320 - protein, 710 aa, synthetic construct
MALPVTALLLPLALLLHAARPQVQLVQSGAEVKKPGASVKVSCKASGYTFTGYYMHWVRQAPGQGLEWMGIINPSGGDTIYAQKFQGRVTMTRDTSTSTVYMELSSLRSEDTAVYYCARGDSSSWYDYYYYMDVWGKGTTVTVSSGGGGSGGGGSGGGGSDIQMTQSPSSLSASVGDRVTITCQASQDISNYLNWYQQKPGKAPKLLIYAASSLQSGVPSRFSGSGSGTDFTLTISSLQPEDFATYYCQQSYRTPLTFGGGTKVEIKTTTPAPRPPTPAPTIASQPLSLRPEACRPAAGGAVHTRGLDFACDIYIWAPLAGTCGVLLLSLVITLYCRRDQRLPPDAHKPPGGGSFRTPIQEEQADAHSTLAKIRVKFSRSADAPAYQQGQNQLYNELNLGRREEYDVLDKRRGRDPEMGGKPRRKNPQEGLYNELQKDKMAEAYSEIGMKGERRRGKGHDGLYQGLSTATKDTYDALHMQALPPRGSGEGRGSLLTCGDVEENPGPMALPVTALLLPLALLLHAARPNWVNVISDLKKIEDLIQSMHIDATLYTESDVHPSCKVTAMKCFLLELQVISLESGDASIHDTVENLIILANNSLSSNGNVTESGCKECEELEEKNIKEFLQSFVHIVQMFINTSTTTPAPRPPTPAPTIASQPLSLRPEACRPAAGGAVHTRGLDFACDIYIWAPLAGTCGVLLLSLVITLYC

SEQ ID NO: 321 - protein, 705 aa, synthetic construct
MALPVTALLLPLALLLHAARPQVQLVQSGAEVKKPGASVKVSCKASGYTFTDYFTHWVRQAPGQGLEWMGWINTYDGNTNYAQKFQGRVTMTRDTSTSTVYMELSSLRSEDTAVYYCAREMEWLGQVDYWGQGTLVTVSSGGGGSGGGGSGGGGSDIQMTQSPSSLSASVGDRVTITCRASQDIRNDLGWYQQKPGKAPKLLIYAASNLETGVPSRFSGSGSGTDFTLTISSLQPEDFATYYCQQSYSAPFTFGPGTKVDIKTTTPAPRPPTPAPTIASQPLSLRPEACRPAAGGAVHTRGLDFACDIYIWAPLAGTCGVLLLSLVITLYCRRDQRLPPDAHKPPGGGSFRTPIQEEQADAHSTLAKIRVKFSRSADAPAYQQGQNQLYNELNLGRREEYDVLDKRRGRDPEMGGKPRRKNPQEGLYNELQKDKMAEAYSEIGMKGERRRGKGHDGLYQGLSTATKDTYDALHMQALPPRGSGEGRGSLLTCGDVEENPGPMALPVTALLLPLALLLHAARPNWVNVISDLKKIEDLIQSMHIDATLYTESDVHPSCKVTAMKCFLLELQVISLESGDASIHDTVENLIILANNSLSSNGNVTESGCKECEELEEKNIKEFLQSFVHIVQMFINTSTTTPAPRPPTPAPTIASQPLSLRPEACRPAAGGAVHTRGLDFACDIYIWAPLAGTCGVLLLSLVITLYC

SEQ ID NO: 322 - protein, 705 aa, synthetic construct
MALPVTALLLPLALLLHAARPQVQLVQSGAEVKKPGASVKVSCKASGYTFTSYYIHWVRQAPGQGLEWMGRINPNGGGTNYAQKFQGRVTMTRDTSTSTVYMELSSLRSEDTAVYYCARGHRGGGGIDYWGQGTLVTVSSGGGGSGGGGSGGGGSDIQMTQSPSSLSASVGDRVTITCRASQEISNYLAWYQQKPGKAPKLLIYDASNLQTGVPSRFSGSGSGTDFTLTISSLQPEDFATYYCQQSYSTPFTFGPGTKVDIKTTTPAPRPPTPAPTIASQPLSLRPEACRPAAGGAVHTRGLDFACDIYIWAPLAGTCGVLLLSLVITLYCRRDQRLPPDAHKPPGGGSFRTPIQEEQADAHSTLAKIRVKFSRSADAPAYQQGQNQLYNELNLGRREEYDVLDKRRGRDPEMGGKPRRKNPQEGLYNELQKDKMAEAYSEIGMKGERRRGKGHDGLYQGLSTATKDTYDALHMQALPPRGSGEGRGSLLTCGDVEENPGPMALPVTALLLPLALLLHAARPNWVNVISDLKKIEDLIQSMHIDATLYTESDVHPSCKVTAMKCFLLELQVISLESGDASIHDTVENLIILANNSLSSNGNVTESGCKECEELEEKNIKEFLQSFVHIVQMFINTSTTTPAPRPPTPAPTIASQPLSLRPEACRPAAGGAVHTRGLDFACDIYIWAPLAGTCGVLLLSLVITLYC

SEQ ID NO: 323 - protein, 705 aa, synthetic construct
MALPVTALLLPLALLLHAARPQVQLVQSGAEVKKPGASVKVSCKASGGTFSSYAISWVRQAPGQGLEWMGWISPNSGDTHYAQKFQGRVTMTRDTSTSTVYMELSSLRSEDTAVYYCARDWGSGWYVDYWGQGTLVTVSSGGGGSGGGGSGGGGSDIQMTQSPSSLSASVGDRVTITCQASQDISDSLNWYQQKPGKAPKLLIYSASSLQSGVPSRFSGSGSGTDFTLTISSLQPEDFATYYCQQSFTTPYTFGQGTKVEIKTTTPAPRPPTPAPTIASQPLSLRPEACRPAAGGAVHTRGLDFACDIYIWAPLAGTCGVLLLSLVITLYCRRDQRLPPDAHKPPGGGSFRTPIQEEQADAHSTLAKIRVKFSRSADAPAYQQGQNQLYNELNLGRREEYDVLDKRRGRDPEMGGKPRRKNPQEGLYNELQKDKMAEAYSEIGMKGERRRGKGHDGLYQGLSTATKDTYDALHMQALPPRGSGEGRGSLLTCGDVEENPGPMALPVTALLLPLALLLHAARPNWVNVISDLKKIEDLIQSMHIDATLYTESDVHPSCKVTAMKCFLLELQVISLESGDASIHDTVENLIILANNSLSSNGNVTESGCKECEELEEKNIKEFLQSFVHIVQMFINTSTTTPAPRPPTPAPTIASQPLSLRPEACRPAAGGAVHTRGLDFACDIYIWAPLAGTCGVLLLSLVITLYC

SEQ ID NO: 324 - protein, 705 aa, synthetic construct
MALPVTALLLPLALLLHAARPQVQLVQSGAEVKKPGSSVKVSCKASGGTFNSYGISWVRQAPGQGLEWMGGIIPIFGTANYAQKFQGRVTITADESTSTAYMELSSLRSEDTAVYYCARDTYGDDAFDIWGQGTMVTVSSGGGGSGGGGSGGGGSDIQMTQSPSSLSASVGDRVTITCRASQSISSWLAWYQQKPGKAPKLLIYDASNLETGVPSRFSGSGSGTDFTLTISSLQPEDFATYYCQQNFSPPLTFGQGTRLEIKTTTPAPRPPTPAPTIASQPLSLRPEACRPAAGGAVHTRGLDFACDIYIWAPLAGTCGVLLLSLVITLYCRRDQRLPPDAHKPPGGGSFRTPIQEEQADAHSTLAKIRVKFSRSADAPAYQQGQNQLYNELNLGRREEYDVLDKRRGRDPEMGGKPRRKNPQEGLYNELQKDKMAEAYSEIGMKGERRRGKGHDGLYQGLSTATKDTYDALHMQALPPRGSGEGRGSLLTCGDVEENPGPMALPVTALLLPLALLLHAARPNWVNVISDLKKIEDLIQSMHIDATLYTESDVHPSCKVTAMKCFLLELQVISLESGDASIHDTVENLIILANNSLSSNGNVTESGCKECEELEEKNIKEFLQSFVHIVQMFINTSTTTPAPRPPTPAPTIASQPLSLRPEACRPAAGGAVHTRGLDFACDIYIWAPLAGTCGVLLLSLVITLYC

SEQ ID NO: 325 - protein, 710 aa, synthetic construct
MALPVTALLLPLALLLHAARPQVQLVQSGAEVKKPGASVKVSCKASGYSFTSYYMHWVRQAPGQGLEWMGIINPSGGTTSYAQKFQGRVTMTRDTSTSTVYMELSSLRSEDTAVYYCARDNSPYSSSWWDYFDYWGQGTLVTVSSGGGGSGGGGSGGGGSDIQMTQSPSSLSASVGDRVTITCRASQDIRHYLAWYQQKPGKAPKLLIYDASSLQSGVPSRFSGSGSGTDFTLTISSLQPEDFATYYCQQTYDAPITFGQGTRLEIKTTTPAPRPPTPAPTIASQPLSLRPEACRPAAGGAVHTRGLDFACDIYIWAPLAGTCGVLLLSLVITLYCRRDQRLPPDAHKPPGGGSFRTPIQEEQADAHSTLAKIRVKFSRSADAPAYQQGQNQLYNELNLGRREEYDVLDKRRGRDPEMGGKPRRKNPQEGLYNELQKDKMAEAYSEIGMKGERRRGKGHDGLYQGLSTATKDTYDALHMQALPPRGSGEGRGSLLTCGDVEENPGPMALPVTALLLPLALLLHAARPNWVNVISDLKKIEDLIQSMHIDATLYTESDVHPSCKVTAMKCFLLELQVISLESGDASIHDTVENLIILANNSLSSNGNVTESGCKECEELEEKNIKEFLQSFVHIVQMFINTSTTTPAPRPPTPAPTIASQPLSLRPEACRPAAGGAVHTRGLDFACDIYIWAPLAGTCGVLLLSLVITLYC

SEQ ID NO: 326 - protein, 708 aa, synthetic construct
MALPVTALLLPLALLLHAARPQVQLVQSGAEVKKPGASVKVSCKASGYTFTDYYIHWVRQAPGQGLEWMGWITPNSGYTYYAQNFQGRVTMTRDTSTSTVYMELSSLRSEDTAVYYCARNTDCYGDFLGLDVWGQGTTVTVSSGGGGSGGGGSGGGGSDIVMTQSPDSLAVSLGERATINCRASSSISNYLAWYQQKPGQPPKLLIYGASTRASGVPDRFSGSGSGTDFTLTISSLQAEDVAVYYCQQSYSTPLTFGQGTKVEIKTTTPAPRPPTPAPTIASQPLSLRPEACRPAAGGAVHTRGLDFACDIYIWAPLAGTCGVLLLSLVITLYCRRDQRLPPDAHKPPGGGSFRTPIQEEQADAHSTLAKIRVKFSRSADAPAYQQGQNQLYNELNLGRREEYDVLDKRRGRDPEMGGKPRRKNPQEGLYNELQKDKMAEAYSEIGMKGERRRGKGHDGLYQGLSTATKDTYDALHMQALPPRGSGEGRGSLLTCGDVEENPGPMALPVTALLLPLALLLHAARPNWVNVISDLKKIEDLIQSMHIDATLYTESDVHPSCKVTAMKCFLLELQVISLESGDASIHDTVENLIILANNSLSSNGNVTESGCKECEELEEKNIKEFLQSFVHIVQMFINTSTTTPAPRPPTPAPTIASQPLSLRPEACRPAAGGAVHTRGLDFACDIYIWAPLAGTCGVLLLSLVITLYC

SEQ ID NO: 327 - protein, 708 aa, synthetic construct
MALPVTALLLPLALLLHAARPQVQLVQSGAEVKKPGASVKVSCKASGYTFNGYLMHWVRQAPGQGLEWMGIVNPSDGSTGYAQKFQGRVTMTRDTSTSTVYMELSSLRSEDTAVYYCAKDTGLRYFDWLLDYWGQGTLVTVSSGGGGSGGGGSGGGGSDIQMTQSPSSLSASVGDRVTITCRASQGITNFLAWYQQKPGKAPKLLIYDASNLETGVPSRFSGSGSGTDFTLTISSLQPEDFATYYCQQSYGAPLTFGQGTRLEIKTTTPAPRPPTPAPTIASQPLSLRPEACRPAAGGAVHTRGLDFACDIYIWAPLAGTCGVLLLSLVITLYCRRDQRLPPDAHKPPGGGSFRTPIQEEQADAHSTLAKIRVKFSRSADAPAYQQGQNQLYNELNLGRREEYDVLDKRRGRDPEMGGKPRRKNPQEGLYNELQKDKMAEAYSEIGMKGERRRGKGHDGLYQGLSTATKDTYDALHMQALPPRGSGEGRGSLLTCGDVEENPGPMALPVTALLLPLALLLHAARPNWVNVISDLKKIEDLIQSMHIDATLYTESDVHPSCKVTAMKCFLLELQVISLESGDASIHDTVENLIILANNSLSSNGNVTESGCKECEELEEKNIKEFLQSFVHIVQMFINTSTTTPAPRPPTPAPTIASQPLSLRPEACRPAAGGAVHTRGLDFACDIYIWAPLAGTCGVLLLSLVITLYC

SEQ ID NO: 328 - protein, 704 aa, synthetic construct
MALPVTALLLPLALLLHAARPQVQLVQSGAEVKKPGASVKVSCKASGYTFTSYYMHWVRQAPGQGLEWMGIIDPSGGRTIYAQRFQGRVTMTRDTSTSTVYMELSSLRSEDTAVYYCARHEAGGIFDYWGQGTLVTVSSGGGGSGGGGSGGGGSDIQMTQSPSSLSASVGDRVTITCQASQDISNYLNWYQQKPGKAPKLLIYSASTLQSGVPSRFSGSGSGTDFTLTISSLQPEDFATYYCQQSYSSPYRFGQGTKVEIKTTTPAPRPPTPAPTIASQPLSLRPEACRPAAGGAVHTRGLDFACDIYIWAPLAGTCGVLLLSLVITLYCRRDQRLPPDAHKPPGGGSFRTPIQEEQADAHSTLAKIRVKFSRSADAPAYQQGQNQLYNELNLGRREEYDVLDKRRGRDPEMGGKPRRKNPQEGLYNELQKDKMAEAYSEIGMKGERRRGKGHDGLYQGLSTATKDTYDALHMQALPPRGSGEGRGSLLTCGDVEENPGPMALPVTALLLPLALLLHAARPNWVNVISDLKKIEDLIQSMHIDATLYTESDVHPSCKVTAMKCFLLELQVISLESGDASIHDTVENLIILANNSLSSNGNVTESGCKECEELEEKNIKEFLQSFVHIVQMFINTSTTTPAPRPPTPAPTIASQPLSLRPEACRPAAGGAVHTRGLDFACDIYIWAPLAGTCGVLLLSLVITLYC

SEQ ID NO: 329 - protein, 712 aa, synthetic construct
MALPVTALLLPLALLLHAARPQVQLVQSGAEVKKPGSSVKVSCKASGYTFSDSYMHWVRQAPGQGLEWVGGIIPMAGIPAYAEEFQGRVTITADESTSTAYMELSSLRSEDTAVYYCARADDYGGNWYFDLWGRGTLVTVSSGGGGSGGGGSGGGGSDIVMTQSPLSLPVTPGEPASISCRSSQSLLHSNGYNYLDWYLQKPGQSPQLLIYAASSLQSGVPDRFSGSGSGTDFTLKISRVEAEDVGVYYCMQGAHWPPTFGQGTKLEIKTTTPAPRPPTPAPTIASQPLSLRPEACRPAAGGAVHTRGLDFACDIYIWAPLAGTCGVLLLSLVITLYCRRDQRLPPDAHKPPGGGSFRTPIQEEQADAHSTLAKIRVKFSRSADAPAYQQGQNQLYNELNLGRREEYDVLDKRRGRDPEMGGKPRRKNPQEGLYNELQKDKMAEAYSEIGMKGERRRGKGHDGLYQGLSTATKDTYDALHMQALPPRGSGEGRGSLLTCGDVEENPGPMALPVTALLLPLALLLHAARPNWVNVISDLKKIEDLIQSMHIDATLYTESDVHPSCKVTAMKCFLLELQVISLESGDASIHDTVENLIILANNSLSSNGNVTESGCKECEELEEKNIKEFLQSFVHIVQMFINTSTTTPAPRPPTPAPTIASQPLSLRPEACRPAAGGAVHTRGLDFACDIYIWAPLAGTCGVLLLSLVITLYC

SEQ ID NO: 330 - protein, 706 aa, synthetic construct
MALPVTALLLPLALLLHAARPQVQLVQSGAEVKKPGASVKVSCKASGYIFTDYYMHWVRQAPGQGLEWMGIINPSGGSTSYAQKFQGRVTMTRDTSTSTVYMELSSLRSEDTAVYYCARDSGWYESWFDPWGQGTLVTVSSGGGGSGGGGSGGGGSDIQMTQSPSSLSASVGDRVTITCRASQDIRDGLGWYQQKPGKAPKLLIYAASTLQSGVPSRFSGSGSGTDFTLTISSLQPEDFATYYCQQSYGTPPTFGQGTKVEIKTTTPAPRPPTPAPTIASQPLSLRPEACRPAAGGAVHTRGLDFACDIYIWAPLAGTCGVLLLSLVITLYCRRDQRLPPDAHKPPGGGSFRTPIQEEQADAHSTLAKIRVKFSRSADAPAYQQGQNQLYNELNLGRREEYDVLDKRRGRDPEMGGKPRRKNPQEGLYNELQKDKMAEAYSEIGMKGERRRGKGHDGLYQGLSTATKDTYDALHMQALPPRGSGEGRGSLLTCGDVEENPGPMALPVTALLLPLALLLHAARPNWVNVISDLKKIEDLIQSMHIDATLYTESDVHPSCKVTAMKCFLLELQVISLESGDASIHDTVENLIILANNSLSSNGNVTESGCKECEELEEKNIKEFLQSFVHIVQMFINTSTTTPAPRPPTPAPTIASQPLSLRPEACRPAAGGAVHTRGLDFACDIYIWAPLAGTCGVLLLSLVITLYC

SEQ ID NO: 331 - protein, 707 aa, synthetic construct
MALPVTALLLPLALLLHAARPQVQLVQSGAEVKKPGASVKVSCKASGYTFTDYYLHWVRQAPGQGLEWMGWISAYNGNTNYAQKFQGRVTMTRDTSTSTVYMELSSLRSEDTAVYYCAREIVGATEDWYFDLWGRGTLVTVSSGGGGSGGGGSGGGGSEIVMTQSPATLSVSPGERATLSCRASQSVSSYLAWYQQKPGQAPRLLIYGASTRATGIPARFSGSGSGTEFTLTISSLQSEDFAVYYCQQYDSSPTFGQGTKVEIKTTTPAPRPPTPAPTIASQPLSLRPEACRPAAGGAVHTRGLDFACDIYIWAPLAGTCGVLLLSLVITLYCRRDQRLPPDAHKPPGGGSFRTPIQEEQADAHSTLAKIRVKFSRSADAPAYQQGQNQLYNELNLGRREEYDVLDKRRGRDPEMGGKPRRKNPQEGLYNELQKDKMAEAYSEIGMKGERRRGKGHDGLYQGLSTATKDTYDALHMQALPPRGSGEGRGSLLTCGDVEENPGPMALPVTALLLPLALLLHAARPNWVNVISDLKKIEDLIQSMHIDATLYTESDVHPSCKVTAMKCFLLELQVISLESGDASIHDTVENLIILANNSLSSNGNVTESGCKECEELEEKNIKEFLQSFVHIVQMFINTSTTTPAPRPPTPAPTIASQPLSLRPEACRPAAGGAVHTRGLDFACDIYIWAPLAGTCGVLLLSLVITLYC

SEQ ID NO: 332 - protein, 705 aa, synthetic construct
MALPVTALLLPLALLLHAARPQVQLVQSGAEVKKPGASVKVSCKASGYTFTAYYLHWVRQAPGQGLEWMGMINPNNGGTIYAQTFQGRVTMTRDTSTSTVYMELSSLRSEDTAVYYCARDLGGYVLFDYWGQGTLVTVSSGGGGSGGGGSGGGGSDIQMTQSPSSLSASVGDRVTITCRASQSISSYLNWYQQKPGKAPKLLIYDASNLETGVPSRFSGSGSGTDFTLTISSLQPEDFATYYCQQSHSAPITFGQGTRLEIKTTTPAPRPPTPAPTIASQPLSLRPEACRPAAGGAVHTRGLDFACDIYIWAPLAGTCGVLLLSLVITLYCRRDQRLPPDAHKPPGGGSFRTPIQEEQADAHSTLAKIRVKFSRSADAPAYQQGQNQLYNELNLGRREEYDVLDKRRGRDPEMGGKPRRKNPQEGLYNELQKDKMAEAYSEIGMKGERRRGKGHDGLYQGLSTATKDTYDALHMQALPPRGSGEGRGSLLTCGDVEENPGPMALPVTALLLPLALLLHAARPNWVNVISDLKKIEDLIQSMHIDATLYTESDVHPSCKVTAMKCFLLELQVISLESGDASIHDTVENLIILANNSLSSNGNVTESGCKECEELEEKNIKEFLQSFVHIVQMFINTSTTTPAPRPPTPAPTIASQPLSLRPEACRPAAGGAVHTRGLDFACDIYIWAPLAGTCGVLLLSLVITLYC

SEQ ID NO: 333 - protein, 705 aa, synthetic construct
MALPVTALLLPLALLLHAARPQVQLVQSGAEVKKPGASVKVSCKASGYTFTDYYIHWVRQAPGQGLEWMGMINPRGGSTTYAQSFQGRVTMTRDTSTSTVYMELSSLRSEDTAVYYCARDLGDYGDYDYWGQGTLVTVSSGGGGSGGGGSGGGGSDIQMTQSPSSLSASVGDRVTITCRASQSISTNLAWYQQKPGKAPKLLIYDASYLEAGVPSRFSGSGSGTDFTLTISSLQPEDFATYYCQQSYSTPPTFGQGTKLEIKTTTPAPRPPTPAPTIASQPLSLRPEACRPAAGGAVHTRGLDFACDIYIWAPLAGTCGVLLLSLVITLYCRRDQRLPPDAHKPPGGGSFRTPIQEEQADAHSTLAKIRVKFSRSADAPAYQQGQNQLYNELNLGRREEYDVLDKRRGRDPEMGGKPRRKNPQEGLYNELQKDKMAEAYSEIGMKGERRRGKGHDGLYQGLSTATKDTYDALHMQALPPRGSGEGRGSLLTCGDVEENPGPMALPVTALLLPLALLLHAARPNWVNVISDLKKIEDLIQSMHIDATLYTESDVHPSCKVTAMKCFLLELQVISLESGDASIHDTVENLIILANNSLSSNGNVTESGCKECEELEEKNIKEFLQSFVHIVQMFINTSTTTPAPRPPTPAPTIASQPLSLRPEACRPAAGGAVHTRGLDFACDIYIWAPLAGTCGVLLLSLVITLYC

SEQ ID NO: 334 - protein, 716 aa, synthetic construct
MALPVTALLLPLALLLHAARPEVQLLESGGGLVQPGGSLRLSCAASGFTFSNSDMNWVRQAPGKGLEWVSAISGGGDTLYYADSVKGRFTISRDNSKNTLYLQMNSLRAEDTAVYYCAMASALDSSGDNEAFDIWGQGTTVTVSSGGGGSGGGGSGGGGSDIVMTQSPDSLAVSLGERATINCKSSQSVLYSSNNKNYLAWYQQKPGQPPKLLIYWASTRDSGVPDRFSGSGSGTDFTLTISSLQAEDVAVYYCQQYYGFPPTFGQGTRLEIKTTTPAPRPPTPAPTIASQPLSLRPEACRPAAGGAVHTRGLDFACDIYIWAPLAGTCGVLLLSLVITLYCRRDQRLPPDAHKPPGGGSFRTPIQEEQADAHSTLAKIRVKFSRSADAPAYQQGQNQLYNELNLGRREEYDVLDKRRGRDPEMGGKPRRKNPQEGLYNELQKDKMAEAYSEIGMKGERRRGKGHDGLYQGLSTATKDTYDALHMQALPPRGSGEGRGSLLTCGDVEENPGPMALPVTALLLPLALLLHAARPNWVNVISDLKKIEDLIQSMHIDATLYTESDVHPSCKVTAMKCFLLELQVISLESGDASIHDTVENLIILANNSLSSNGNVTESGCKECEELEEKNIKEFLQSFVHIVQMFINTSTTTPAPRPPTPAPTIASQPLSLRPEACRPAAGGAVHTRGLDFACDIYIWAPLAGTCGVLLLSLVITLYC

SEQ ID NO: 335 - protein, 708 aa, synthetic construct
MALPVTALLLPLALLLHAARPQVQLVQSGAEVKKPGASVKVSCKASGYTFTSYYMHWVRQAPGQGLEWMGWINPNNGGTSYAQKFQGRVTMTRDTSTSTVYMELSSLRSEDTAVYYCARVEDDFWSGPSFDYWGQGTLVTVSSGGGGSGGGGSGGGGSDIQMTQSPSSLSASVGDRVTITCQASHDISKFLNWYQQKPGKAPKLLIYDASNLQRGVPSRFSGSGSGTDFTLTISSLQPEDFATYYCQQTYSFPFTFGQGTKLEIKTTTPAPRPPTPAPTIASQPLSLRPEACRPAAGGAVHTRGLDFACDIYIWAPLAGTCGVLLLSLVITLYCRRDQRLPPDAHKPPGGGSFRTPIQEEQADAHSTLAKIRVKFSRSADAPAYQQGQNQLYNELNLGRREEYDVLDKRRGRDPEMGGKPRRKNPQEGLYNELQKDKMAEAYSEIGMKGERRRGKGHDGLYQGLSTATKDTYDALHMQALPPRGSGEGRGSLLTCGDVEENPGPMALPVTALLLPLALLLHAARPNWVNVISDLKKIEDLIQSMHIDATLYTESDVHPSCKVTAMKCFLLELQVISLESGDASIHDTVENLIILANNSLSSNGNVTESGCKECEELEEKNIKEFLQSFVHIVQMFINTSTTTPAPRPPTPAPTIASQPLSLRPEACRPAAGGAVHTRGLDFACDIYIWAPLAGTCGVLLLSLVITLYC

SEQ ID NO: 336 - protein, 710 aa, synthetic construct
MALPVTALLLPLALLLHAARPQVQLVQSGAEVKKPGSSVKVSCKASGGTFTNYAFSWVRQAPGQGLEWMGGIIPISGAANYAQKFQGRVTITADESTSTAYMELSSLRSEDTAVYYCARGSGLDDAFDIWGQGTMVTVSSGGGGSGGGGSGGGGSDIVMTQSPLSLPVTPGEPASISCRSSQSLLHSNGYNYLDWYLQKPGQSPQLLIYDASSLQSGVPDRFSGSGSGTDFTLKISRVEAEDVGVYYCMQARQTPLTFGQGTRLEIKTTTPAPRPPTPAPTIASQPLSLRPEACRPAAGGAVHTRGLDFACDIYIWAPLAGTCGVLLLSLVITLYCRRDQRLPPDAHKPPGGGSFRTPIQEEQADAHSTLAKIRVKFSRSADAPAYQQGQNQLYNELNLGRREEYDVLDKRRGRDPEMGGKPRRKNPQEGLYNELQKDKMAEAYSEIGMKGERRRGKGHDGLYQGLSTATKDTYDALHMQALPPRGSGEGRGSLLTCGDVEENPGPMALPVTALLLPLALLLHAARPNWVNVISDLKKIEDLIQSMHIDATLYTESDVHPSCKVTAMKCFLLELQVISLESGDASIHDTVENLIILANNSLSSNGNVTESGCKECEELEEKNIKEFLQSFVHIVQMFINTSTTTPAPRPPTPAPTIASQPLSLRPEACRPAAGGAVHTRGLDFACDIYIWAPLAGTCGVLLLSLVITLYC

SEQ ID NO: 337 - protein, 720 aa, synthetic construct
MALPVTALLLPLALLLHAARPQVQLVQSGAEVKKPGASVKVSCKASGYTFTAYYMHWVRQAPGQGLEWMGWMNPNSGNTGYAQKFQGRVTMTRDTSTSTVYMELSSLRSEDTAVYYCAREGRIDYGDYDDYYYYYGMDVWGQGTTVTVSSGGGGSGGGGSGGGGSDIVMTQSPLSLPVTPGEPASISCRSSQSLLHSNGYNYLDWYLQKPGQSPQLLIYAASNLQGGVPDRFSGSGSGTDFTLKISRVEAEDVGVYYCMQTLESPVTFGGGTKVEIKTTTPAPRPPTPAPTIASQPLSLRPEACRPAAGGAVHTRGLDFACDIYIWAPLAGTCGVLLLSLVITLYCRRDQRLPPDAHKPPGGGSFRTPIQEEQADAHSTLAKIRVKFSRSADAPAYQQGQNQLYNELNLGRREEYDVLDKRRGRDPEMGGKPRRKNPQEGLYNELQKDKMAEAYSEIGMKGERRRGKGHDGLYQGLSTATKDTYDALHMQALPPRGSGEGRGSLLTCGDVEENPGPMALPVTALLLPLALLLHAARPNWVNVISDLKKIEDLIQSMHIDATLYTESDVHPSCKVTAMKCFLLELQVISLESGDASIHDTVENLIILANNSLSSNGNVTESGCKECEELEEKNIKEFLQSFVHIVQMFINTSTTTPAPRPPTPAPTIASQPLSLRPEACRPAAGGAVHTRGLDFACDIYIWAPLAGTCGVLLLSLVITLYC

SEQ ID NO: 338 - protein, 706 aa, synthetic construct
MALPVTALLLPLALLLHAARPQVQLVQSGAEVKKPGASVKVSCKASGYTFTDYYVHWVRQAPGQGLEWMGTINPSGGSTSYAQKFQGRVTMTRDTSTSTVYMELSSLRSEDTAVYYCARDQGLWFTGFDYWGQGTLVTVSSGGGGSGGGGSGGGGSDIQMTQSPSSLSASVGDRVTITCRASQGISNNLNWYQQKPGKAPKLLIYDASNLERGVPSRFSGSGSGTDFTLTISSLQPEDFATYYCQQSYDGPITFGQGTRLEIKTTTPAPRPPTPAPTIASQPLSLRPEACRPAAGGAVHTRGLDFACDIYIWAPLAGTCGVLLLSLVITLYCRRDQRLPPDAHKPPGGGSFRTPIQEEQADAHSTLAKIRVKFSRSADAPAYQQGQNQLYNELNLGRREEYDVLDKRRGRDPEMGGKPRRKNPQEGLYNELQKDKMAEAYSEIGMKGERRRGKGHDGLYQGLSTATKDTYDALHMQALPPRGSGEGRGSLLTCGDVEENPGPMALPVTALLLPLALLLHAARPNWVNVISDLKKIEDLIQSMHIDATLYTESDVHPSCKVTAMKCFLLELQVISLESGDASIHDTVENLIILANNSLSSNGNVTESGCKECEELEEKNIKEFLQSFVHIVQMFINTSTTTPAPRPPTPAPTIASQPLSLRPEACRPAAGGAVHTRGLDFACDIYIWAPLAGTCGVLLLSLVITLYC

SEQ ID NO: 339 - protein, 706 aa, synthetic construct
MALPVTALLLPLALLLHAARPQVQLVQSGAEVKKPGASVKVSCKASGYTFTAYHMHWVRQAPGQGLEWMGIINPGDGATGYAQNLQGRVTMTRDTSTSTVYMELSSLRSEDTAVYYCAGEGISGSDAFDIWGQGTLVTVSSGGGGSGGGGSGGGGSDIQMTQSPSSLSASVGDRVTITCRASQSISSWLAWYQQKPGKAPKLLIYAASSLQSGVPSRFSGSGSGTDFTLTISSLQPEDFATYYCLQDYSYPLTFGGGTKVEIKTTTPAPRPPTPAPTIASQPLSLRPEACRPAAGGAVHTRGLDFACDIYIWAPLAGTCGVLLLSLVITLYCRRDQRLPPDAHKPPGGGSFRTPIQEEQADAHSTLAKIRVKFSRSADAPAYQQGQNQLYNELNLGRREEYDVLDKRRGRDPEMGGKPRRKNPQEGLYNELQKDKMAEAYSEIGMKGERRRGKGHDGLYQGLSTATKDTYDALHMQALPPRGSGEGRGSLLTCGDVEENPGPMALPVTALLLPLALLLHAARPNWVNVISDLKKIEDLIQSMHIDATLYTESDVHPSCKVTAMKCFLLELQVISLESGDASIHDTVENLIILANNSLSSNGNVTESGCKECEELEEKNIKEFLQSFVHIVQMFINTSTTTPAPRPPTPAPTIASQPLSLRPEACRPAAGGAVHTRGLDFACDIYIWAPLAGTCGVLLLSLVITLYC

SEQ ID NO: 340 - protein, 704 aa, synthetic construct
MALPVTALLLPLALLLHAARPQVQLVQSGAEVKKPGSSVKVSCKASGGTFSSYAISWVRQAPGQGLEWMGWMNPNSGNTGYAQKFQGRVTITADESTSTAYMELSSLRSEDTAVYYCAWGVDPYYFDYWGQGTLVTVSSGGGGSGGGGSGGGGSDIQMTQSPSSLSASVGDRVTITCRASQSINRWLAWYQQKPGKAPKLLIYDASNLETGVPSRFSGSGSGTDFTLTISSLQPEDFATYYCQQSYITPLTFGGGTKVEIKTTTPAPRPPTPAPTIASQPLSLRPEACRPAAGGAVHTRGLDFACDIYIWAPLAGTCGVLLLSLVITLYCRRDQRLPPDAHKPPGGGSFRTPIQEEQADAHSTLAKIRVKFSRSADAPAYQQGQNQLYNELNLGRREEYDVLDKRRGRDPEMGGKPRRKNPQEGLYNELQKDKMAEAYSEIGMKGERRRGKGHDGLYQGLSTATKDTYDALHMQALPPRGSGEGRGSLLTCGDVEENPGPMALPVTALLLPLALLLHAARPNWVNVISDLKKIEDLIQSMHIDATLYTESDVHPSCKVTAMKCFLLELQVISLESGDASIHDTVENLIILANNSLSSNGNVTESGCKECEELEEKNIKEFLQSFVHIVQMFINTSTTTPAPRPPTPAPTIASQPLSLRPEACRPAAGGAVHTRGLDFACDIYIWAPLAGTCGVLLLSLVITLYC

SEQ ID NO: 341 - protein, 704 aa, synthetic construct
MALPVTALLLPLALLLHAARPQVQLVQSGAEVKKPGASVKVSCKASGYTFTSYYMHWVRQAPGQGLEWMGIFNPSDGSTSYAQKFQGRVTMTRDTSTSTVYMELSSLRSEDTAVYYCARDVGETTFDPWGQGTLVTVSSGGGGSGGGGSGGGGSDIQMTQSPSSLSASVGDRVTITCQASQDISNYLNWYQQKPGKAPKLLIYDASSLESGVPSRFSGSGSGTDFTLTISSLQPEDFATYYCQQTNSFPITFGQGTRLEIKTTTPAPRPPTPAPTIASQPLSLRPEACRPAAGGAVHTRGLDFACDIYIWAPLAGTCGVLLLSLVITLYCRRDQRLPPDAHKPPGGGSFRTPIQEEQADAHSTLAKIRVKFSRSADAPAYQQGQNQLYNELNLGRREEYDVLDKRRGRDPEMGGKPRRKNPQEGLYNELQKDKMAEAYSEIGMKGERRRGKGHDGLYQGLSTATKDTYDALHMQALPPRGSGEGRGSLLTCGDVEENPGPMALPVTALLLPLALLLHAARPNWVNVISDLKKIEDLIQSMHIDATLYTESDVHPSCKVTAMKCFLLELQVISLESGDASIHDTVENLIILANNSLSSNGNVTESGCKECEELEEKNIKEFLQSFVHIVQMFINTSTTTPAPRPPTPAPTIASQPLSLRPEACRPAAGGAVHTRGLDFACDIYIWAPLAGTCGVLLLSLVITLYC

SEQ ID NO: 342 - protein, 709 aa, synthetic construct
MALPVTALLLPLALLLHAARPQVQLVQSGAEVKKPGASVKVSCKASGYTFTSYGISWVRQAPGQGLEWMGWISAYNGHTNYAQKFQGRVTMTRDTSTSTVYMELSSLRSEDTAVYYCARDSVRGWDYYYGMGVWGQGTTVTVSSGGGGSGGGGSGGGGSDIQMTQSPSSLSASVGDRVTITCQASQDIRNFLNWYQQKPGKAPKLLIYAASTLQSGVPSRFSGSGSGTDFTLTISSLQPEDFATYYCQQSYSAPSTFGQGTKLEIKTTTPAPRPPTPAPTIASQPLSLRPEACRPAAGGAVHTRGLDFACDIYIWAPLAGTCGVLLLSLVITLYCRRDQRLPPDAHKPPGGGSFRTPIQEEQADAHSTLAKIRVKFSRSADAPAYQQGQNQLYNELNLGRREEYDVLDKRRGRDPEMGGKPRRKNPQEGLYNELQKDKMAEAYSEIGMKGERRRGKGHDGLYQGLSTATKDTYDALHMQALPPRGSGEGRGSLLTCGDVEENPGPMALPVTALLLPLALLLHAARPNWVNVISDLKKIEDLIQSMHIDATLYTESDVHPSCKVTAMKCFLLELQVISLESGDASIHDTVENLIILANNSLSSNGNVTESGCKECEELEEKNIKEFLQSFVHIVQMFINTSTTTPAPRPPTPAPTIASQPLSLRPEACRPAAGGAVHTRGLDFACDIYIWAPLAGTCGVLLLSLVITLYC

SEQ ID NO: 343 - protein, 706 aa, synthetic construct
MALPVTALLLPLALLLHAARPQVQLVQSGAEVKKPGSSVKVSCKASGYTFIDYYMHWVRQAPGQGLEWMGWMNPHSGNSDNAPKFQGRVTITADESTSTAYMELSSLRSEDTAVYYCARGYSGYDLTADYWGQGTLVTVSSGGGGSGGGGSGGGGSDIQMTQSPSSLSASVGDRVTITCRASQSISNYLNWYQQKPGKAPKLLIYDASNLETGVPSRFSGSGSGTDFTLTISSLQPEDFATYYCQQSYSTPITFGQGTRLEIKTTTPAPRPPTPAPTIASQPLSLRPEACRPAAGGAVHTRGLDFACDIYIWAPLAGTCGVLLLSLVITLYCRRDQRLPPDAHKPPGGGSFRTPIQEEQADAHSTLAKIRVKFSRSADAPAYQQGQNQLYNELNLGRREEYDVLDKRRGRDPEMGGKPRRKNPQEGLYNELQKDKMAEAYSEIGMKGERRRGKGHDGLYQGLSTATKDTYDALHMQALPPRGSGEGRGSLLTCGDVEENPGPMALPVTALLLPLALLLHAARPNWVNVISDLKKIEDLIQSMHIDATLYTESDVHPSCKVTAMKCFLLELQVISLESGDASIHDTVENLIILANNSLSSNGNVTESGCKECEELEEKNIKEFLQSFVHIVQMFINTSTTTPAPRPPTPAPTIASQPLSLRPEACRPAAGGAVHTRGLDFACDIYIWAPLAGTCGVLLLSLVITLYC

SEQ ID NO: 344 - protein, 715 aa, synthetic construct
MALPVTALLLPLALLLHAARPQVQLVQSGAEVKKPGASVKVSCKASGYTFTGQYMHWVRQAPGQGLEWMGWINPNTGDTNYAQKFQGRVTMTRDTSTSTVYMELSSLRSEDTAVYYCARDSVFEVEGGTDYYYYYGMDVWGQGTMVTVSSGGGGSGGGGSGGGGSDIQMTQSPSSLSASVGDRVTITCRASETISGWLAWYQQKPGKAPKLLIYDASNLETGVPSRFSGSGSGTDFTLTISSLQPEDFATYYCQQSYSTPWTFGQGTKLEIKTTTPAPRPPTPAPTIASQPLSLRPEACRPAAGGAVHTRGLDFACDIYIWAPLAGTCGVLLLSLVITLYCRRDQRLPPDAHKPPGGGSFRTPIQEEQADAHSTLAKIRVKFSRSADAPAYQQGQNQLYNELNLGRREEYDVLDKRRGRDPEMGGKPRRKNPQEGLYNELQKDKMAEAYSEIGMKGERRRGKGHDGLYQGLSTATKDTYDALHMQALPPRGSGEGRGSLLTCGDVEENPGPMALPVTALLLPLALLLHAARPNWVNVISDLKKIEDLIQSMHIDATLYTESDVHPSCKVTAMKCFLLELQVISLESGDASIHDTVENLIILANNSLSSNGNVTESGCKECEELEEKNIKEFLQSFVHIVQMFINTSTTTPAPRPPTPAPTIASQPLSLRPEACRPAAGGAVHTRGLDFACDIYIWAPLAGTCGVLLLSLVITLYC

SEQ ID NO: 345 - protein, 705 aa, synthetic construct
MALPVTALLLPLALLLHAARPQVQLVQSGAEVKKPGASVKVSCKASGYTFTSYDINWVRQAPGQGLEWMGVINPSGGGTSYAQKFQGRVTMTRDTSTSTVYMELSSLRSEDTAVYYCARYSGYDWVFDYWGQGTLVTVSSGGGGSGGGGSGGGGSDIQMTQSPSSLSASVGDRVTITCRASQGIGSWLAWYQQKPGKAPKLLIYAASTLQSGVPSRFSGSGSGTDFTLTISSLQPEDFATYYCQQSYSTPWTFGPGTKVDIKTTTPAPRPPTPAPTIASQPLSLRPEACRPAAGGAVHTRGLDFACDIYIWAPLAGTCGVLLLSLVITLYCRRDQRLPPDAHKPPGGGSFRTPIQEEQADAHSTLAKIRVKFSRSADAPAYQQGQNQLYNELNLGRREEYDVLDKRRGRDPEMGGKPRRKNPQEGLYNELQKDKMAEAYSEIGMKGERRRGKGHDGLYQGLSTATKDTYDALHMQALPPRGSGEGRGSLLTCGDVEENPGPMALPVTALLLPLALLLHAARPNWVNVISDLKKIEDLIQSMHIDATLYTESDVHPSCKVTAMKCFLLELQVISLESGDASIHDTVENLIILANNSLSSNGNVTESGCKECEELEEKNIKEFLQSFVHIVQMFINTSTTTPAPRPPTPAPTIASQPLSLRPEACRPAAGGAVHTRGLDFACDIYIWAPLAGTCGVLLLSLVITLYC

SEQ ID NO: 346 - protein, 706 aa, synthetic construct
MALPVTALLLPLALLLHAARPQVQLVQSGAEVKKPGASVKVSCKASGYTFANYYMHWVRQAPGQGLEWMGIINPSGGSTSYAQKFQGRVTMTRDTSTSTVYMELSSLRSEDTAVYYCARDSGSYFGWFDPWGQGTLVTVSSGGGGSGGGGSGGGGSDIQMTQSPSSLSASVGDRVTITCRASQSISSSLAWYQQKPGKAPKLLIYDASSLQSGVPSRFSGSGSGTDFTLTISSLQPEDFATYYCQQSYNTPPTFGGGTKLEIKTTTPAPRPPTPAPTIASQPLSLRPEACRPAAGGAVHTRGLDFACDIYIWAPLAGTCGVLLLSLVITLYCRRDQRLPPDAHKPPGGGSFRTPIQEEQADAHSTLAKIRVKFSRSADAPAYQQGQNQLYNELNLGRREEYDVLDKRRGRDPEMGGKPRRKNPQEGLYNELQKDKMAEAYSEIGMKGERRRGKGHDGLYQGLSTATKDTYDALHMQALPPRGSGEGRGSLLTCGDVEENPGPMALPVTALLLPLALLLHAARPNWVNVISDLKKIEDLIQSMHIDATLYTESDVHPSCKVTAMKCFLLELQVISLESGDASIHDTVENLIILANNSLSSNGNVTESGCKECEELEEKNIKEFLQSFVHIVQMFINTSTTTPAPRPPTPAPTIASQPLSLRPEACRPAAGGAVHTRGLDFACDIYIWAPLAGTCGVLLLSLVITLYC

SEQ ID NO: 347 - protein, 706 aa, synthetic construct
MALPVTALLLPLALLLHAARPQVQLVQSGAEVKKPGASVKVSCKASGYTFTTYYMHWVRQAPGQGLEWMGIINPTGGSTYYAQKFQGRVTMTRDTSTSTVYMELSSLRSEDTAVYYCARDSGNYQGIFDYWGQGTLVTVSSGGGGSGGGGSGGGGSDIQMTQSPSSLSASVGDRVTITCRASQGIGGYLAWYQQKPGKAPKLLIYDASNLETGVPSRFSGSGSGTDFTLTISSLQPEDFATYYCQQSYDSPPTFGQGTRLEIKTTTPAPRPPTPAPTIASQPLSLRPEACRPAAGGAVHTRGLDFACDIYIWAPLAGTCGVLLLSLVITLYCRRDQRLPPDAHKPPGGGSFRTPIQEEQADAHSTLAKIRVKFSRSADAPAYQQGQNQLYNELNLGRREEYDVLDKRRGRDPEMGGKPRRKNPQEGLYNELQKDKMAEAYSEIGMKGERRRGKGHDGLYQGLSTATKDTYDALHMQALPPRGSGEGRGSLLTCGDVEENPGPMALPVTALLLPLALLLHAARPNWVNVISDLKKIEDLIQSMHIDATLYTESDVHPSCKVTAMKCFLLELQVISLESGDASIHDTVENLIILANNSLSSNGNVTESGCKECEELEEKNIKEFLQSFVHIVQMFINTSTTTPAPRPPTPAPTIASQPLSLRPEACRPAAGGAVHTRGLDFACDIYIWAPLAGTCGVLLLSLVITLYC

SEQ ID NO: 348 - protein, 705 aa, synthetic construct
MALPVTALLLPLALLLHAARPQVQLVQSGAEVKKPGASVKVSCKASGNTFTSYYMHWVRQAPGQGLEWMGWINPNSGDTNYAQNFQGRVTMTRDTSTSTVYMELSSLRSEDTAVYYCARGVSGYDLFDYWGQGTLVTVSSGGGGSGGGGSGGGGSDIQMTQSPSSLSASVGDRVTITCRASQSVSSYLNWYQQKPGKAPKLLIYDTSNLETGVPSRFSGSGSGTDFTLTISSLQPEDFATYYCQQAHSFPLTFGGGTKVEIKTTTPAPRPPTPAPTIASQPLSLRPEACRPAAGGAVHTRGLDFACDIYIWAPLAGTCGVLLLSLVITLYCRRDQRLPPDAHKPPGGGSFRTPIQEEQADAHSTLAKIRVKFSRSADAPAYQQGQNQLYNELNLGRREEYDVLDKRRGRDPEMGGKPRRKNPQEGLYNELQKDKMAEAYSEIGMKGERRRGKGHDGLYQGLSTATKDTYDALHMQALPPRGSGEGRGSLLTCGDVEENPGPMALPVTALLLPLALLLHAARPNWVNVISDLKKIEDLIQSMHIDATLYTESDVHPSCKVTAMKCFLLELQVISLESGDASIHDTVENLIILANNSLSSNGNVTESGCKECEELEEKNIKEFLQSFVHIVQMFINTSTTTPAPRPPTPAPTIASQPLSLRPEACRPAAGGAVHTRGLDFACDIYIWAPLAGTCGVLLLSLVITLYC

SEQ ID NO: 349 - protein, 705 aa, synthetic construct
MALPVTALLLPLALLLHAARPEVQLVESGGGLVKPGGSLRLSCAASGFTFSSYGMHWVRQAPGKGLEWVASIKHDGSEQYYVDSVKGRFTISRDDSKNTLYLQMNSLKTEDTAVYYCAASGVDVWGQGTTVTVSSGGGGSGGGGSGGGGSDIVMTQSPLSLPVTPGEPASISCRSSQSLLHSNGYNYLDWYLQKPGQSPQLLIYLGSTRASGVPDRFSGSGSGTDFTLKISRVEAEDVGVYYCMQALDTPLTFGGGTKLEIKTTTPAPRPPTPAPTIASQPLSLRPEACRPAAGGAVHTRGLDFACDIYIWAPLAGTCGVLLLSLVITLYCRRDQRLPPDAHKPPGGGSFRTPIQEEQADAHSTLAKIRVKFSRSADAPAYQQGQNQLYNELNLGRREEYDVLDKRRGRDPEMGGKPRRKNPQEGLYNELQKDKMAEAYSEIGMKGERRRGKGHDGLYQGLSTATKDTYDALHMQALPPRGSGEGRGSLLTCGDVEENPGPMALPVTALLLPLALLLHAARPNWVNVISDLKKIEDLIQSMHIDATLYTESDVHPSCKVTAMKCFLLELQVISLESGDASIHDTVENLIILANNSLSSNGNVTESGCKECEELEEKNIKEFLQSFVHIVQMFINTSTTTPAPRPPTPAPTIASQPLSLRPEACRPAAGGAVHTRGLDFACDIYIWAPLAGTCGVLLLSLVITLYC

SEQ ID NO: 350 - protein, 708 aa, synthetic construct
MALPVTALLLPLALLLHAARPQVQLVQSGAEVKKPGASVKVSCKASGGTFSRYDINWVRQAPGQGLEWVGIIDPTGASTSYAQKFQGRVTMTRDTSTSTVYMELSSLRSEDTAVYYCARDYSYGMDYYGMDVWGQGTLVTVSSGGGGSGGGGSGGGGSDIQMTQSPSSLSASVGDRVTITCQASQDISNYLNWYQQKPGKAPKLLIYDTSNLQTGVPSRFSGSGSGTDFTLTISSLQPEDFATYYLSTDLQTTAHFGQGTKVEIKTTTPAPRPPTPAPTIASQPLSLRPEACRPAAGGAVHTRGLDFACDIYIWAPLAGTCGVLLLSLVITLYCRRDQRLPPDAHKPPGGGSFRTPIQEEQADAHSTLAKIRVKFSRSADAPAYQQGQNQLYNELNLGRREEYDVLDKRRGRDPEMGGKPRRKNPQEGLYNELQKDKMAEAYSEIGMKGERRRGKGHDGLYQGLSTATKDTYDALHMQALPPRGSGEGRGSLLTCGDVEENPGPMALPVTALLLPLALLLHAARPNWVNVISDLKKIEDLIQSMHIDATLYTESDVHPSCKVTAMKCFLLELQVISLESGDASIHDTVENLIILANNSLSSNGNVTESGCKECEELEEKNIKEFLQSFVHIVQMFINTSTTTPAPRPPTPAPTIASQPLSLRPEACRPAAGGAVHTRGLDFACDIYIWAPLAGTCGVLLLSLVITLYC

SEQ ID NO: 351 - protein, 710 aa, synthetic construct
MALPVTALLLPLALLLHAARPQVQLVQSGAEVKKPGSSVKVSCKASGYTFTSYGISWVRQAPGQGLEWMGGIIPIFGTTNYAQKFQGRVTITADESTSTAYMELSSLRSEDTAVYYCARDHSGDGYFDLWGRGTLVTVSSGGGGSGGGGSGGGGSDIVMTQSPLSLPVTPGEPASISCRSSQSLLHSNGYNYLDWYLQKPGQSPQLLIYDASSLQSGVPDRFSGSGSGTDFTLKISRVEAEDVGVYYCMQGTHWPPTFGQGTKVEIKTTTPAPRPPTPAPTIASQPLSLRPEACRPAAGGAVHTRGLDFACDIYIWAPLAGTCGVLLLSLVITLYCRRDQRLPPDAHKPPGGGSFRTPIQEEQADAHSTLAKIRVKFSRSADAPAYQQGQNQLYNELNLGRREEYDVLDKRRGRDPEMGGKPRRKNPQEGLYNELQKDKMAEAYSEIGMKGERRRGKGHDGLYQGLSTATKDTYDALHMQALPPRGSGEGRGSLLTCGDVEENPGPMALPVTALLLPLALLLHAARPNWVNVISDLKKIEDLIQSMHIDATLYTESDVHPSCKVTAMKCFLLELQVISLESGDASIHDTVENLIILANNSLSSNGNVTESGCKECEELEEKNIKEFLQSFVHIVQMFINTSTTTPAPRPPTPAPTIASQPLSLRPEACRPAAGGAVHTRGLDFACDIYIWAPLAGTCGVLLLSLVITLYC

SEQ ID NO: 352 - protein, 704 aa, synthetic construct
MALPVTALLLPLALLLHAARPQVQLVQSGAEVKKPGASVKVSCKASGYTFTENEMHWVRQAPGQGLEWMGWINPNSGGTNYAQKFQGRVTMTRDTSTSTVYMELSSLRSEDTAVYYCAGSWGGYYFDYWGQGTLVTVSSGGGGSGGGGSGGGGSDIQMTQSPSSLSASVGDRVTITCRASQSVSRYLNWYQQKPGKAPKLLIYDASNLETGVPSRFSGSGSGTDFTLTISSLQPEDFATYYCQQADSFPVTFGQGTKLEIKTTTPAPRPPTPAPTIASQPLSLRPEACRPAAGGAVHTRGLDFACDIYIWAPLAGTCGVLLLSLVITLYCRRDQRLPPDAHKPPGGGSFRTPIQEEQADAHSTLAKIRVKFSRSADAPAYQQGQNQLYNELNLGRREEYDVLDKRRGRDPEMGGKPRRKNPQEGLYNELQKDKMAEAYSEIGMKGERRRGKGHDGLYQGLSTATKDTYDALHMQALPPRGSGEGRGSLLTCGDVEENPGPMALPVTALLLPLALLLHAARPNWVNVISDLKKIEDLIQSMHIDATLYTESDVHPSCKVTAMKCFLLELQVISLESGDASIHDTVENLIILANNSLSSNGNVTESGCKECEELEEKNIKEFLQSFVHIVQMFINTSTTTPAPRPPTPAPTIASQPLSLRPEACRPAAGGAVHTRGLDFACDIYIWAPLAGTCGVLLLSLVITLYC

SEQ ID NO: 353 - protein, 707 aa, synthetic construct
MALPVTALLLPLALLLHAARPQVQLVQSGAEVKKPGASVKVSCKASGYTFTNYYIYWVRQAPGQGLEWMGWINPNDGATNYAQKFQGRVTMTRDTSTSTVYMELSSLRSEDTAVYYCAREGNDYYYYFMDYWGQGTLVTVSSGGGGSGGGGSGGGGSDIQMTQSPSSLSASVGDRVTITCRASQGISNNLNWYQQKPGKAPKLLIYHASNLETGVPSRFSGSGSGTDFTLTISSLQPEDFATYYCQQSYDGPMTFGQGTKLEIKTTTPAPRPPTPAPTIASQPLSLRPEACRPAAGGAVHTRGLDFACDIYIWAPLAGTCGVLLLSLVITLYCRRDQRLPPDAHKPPGGGSFRTPIQEEQADAHSTLAKIRVKFSRSADAPAYQQGQNQLYNELNLGRREEYDVLDKRRGRDPEMGGKPRRKNPQEGLYNELQKDKMAEAYSEIGMKGERRRGKGHDGLYQGLSTATKDTYDALHMQALPPRGSGEGRGSLLTCGDVEENPGPMALPVTALLLPLALLLHAARPNWVNVISDLKKIEDLIQSMHIDATLYTESDVHPSCKVTAMKCFLLELQVISLESGDASIHDTVENLIILANNSLSSNGNVTESGCKECEELEEKNIKEFLQSFVHIVQMFINTSTTTPAPRPPTPAPTIASQPLSLRPEACRPAAGGAVHTRGLDFACDIYIWAPLAGTCGVLLLSLVITLYC

SEQ ID NO: 354 - protein, 713 aa, synthetic construct
MALPVTALLLPLALLLHAARPQVQLVQSGAEVKKPGSSVKVSCKASGGTFSSYAISWVRQAPGQGLEWMGGITPMFGTTDYAQKFQGRVTITADESTSTAYMELSSLRSEDTAVYYCARDERDGYATVAFDIWGQGTMVTVSSGGGGSGGGGSGGGGSDIVMTQSPLSLPVTPGEPASISCRSSQSLLHSNGYNYLDWYLQKPGQSPQLLIYDASNLETGVPDRFSGSGSGTDFTLKISRVEAEDVGVYYCMQGTHWPPTFGQGTKVEIKTTTPAPRPPTPAPTIASQPLSLRPEACRPAAGGAVHTRGLDFACDIYIWAPLAGTCGVLLLSLVITLYCRRDQRLPPDAHKPPGGGSFRTPIQEEQADAHSTLAKIRVKFSRSADAPAYQQGQNQLYNELNLGRREEYDVLDKRRGRDPEMGGKPRRKNPQEGLYNELQKDKMAEAYSEIGMKGERRRGKGHDGLYQGLSTATKDTYDALHMQALPPRGSGEGRGSLLTCGDVEENPGPMALPVTALLLPLALLLHAARPNWVNVISDLKKIEDLIQSMHIDATLYTESDVHPSCKVTAMKCFLLELQVISLESGDASIHDTVENLIILANNSLSSNGNVTESGCKECEELEEKNIKEFLQSFVHIVQMFINTSTTTPAPRPPTPAPTIASQPLSLRPEACRPAAGGAVHTRGLDFACDIYIWAPLAGTCGVLLLSLVITLYC

SEQ ID NO: 355 - protein, 708 aa, synthetic construct
MALPVTALLLPLALLLHAARPQVQLVQSGAEVKKPGASVKVSCKASGYTFTSYYMHWVRQAPGQGLEWMGIINPSDGGTSYADKFQGRVTMTRDTSTSTVYMELSSLRSEDTAVYYCARALAPLGWGDGMDVWGQGTTVTVSSGGGGSGGGGSGGGGSDIQMTQSPSSLSASVGDRVTITCQASQDISNYLNWYQQKPGKAPKLLIYDASNLETGVPSRFSGSGSGTDFTLTISSLQPEDFATYYCQQSYDGPITFGQGTRLEIKTTTPAPRPPTPAPTIASQPLSLRPEACRPAAGGAVHTRGLDFACDIYIWAPLAGTCGVLLLSLVITLYCRRDQRLPPDAHKPPGGGSFRTPIQEEQADAHSTLAKIRVKFSRSADAPAYQQGQNQLYNELNLGRREEYDVLDKRRGRDPEMGGKPRRKNPQEGLYNELQKDKMAEAYSEIGMKGERRRGKGHDGLYQGLSTATKDTYDALHMQALPPRGSGEGRGSLLTCGDVEENPGPMALPVTALLLPLALLLHAARPNWVNVISDLKKIEDLIQSMHIDATLYTESDVHPSCKVTAMKCFLLELQVISLESGDASIHDTVENLIILANNSLSSNGNVTESGCKECEELEEKNIKEFLQSFVHIVQMFINTSTTTPAPRPPTPAPTIASQPLSLRPEACRPAAGGAVHTRGLDFACDIYIWAPLAGTCGVLLLSLVITLYC

SEQ ID NO: 356 - protein, 705 aa, synthetic construct
MALPVTALLLPLALLLHAARPQVQLVQSGAEVKKPGSSVKVSCKASGYTFTSYYIHWVRQAPGQGLEWMGWMNPSSGVTNFAQKFQGRVTITADESTSTAYMELSSLRSEDTAVYYCARGSDQGDWSDPWGQGTLVTVSSGGGGSGGGGSGGGGSDIQMTQSPSSLSASVGDRVTITCRASQSISSYLNWYQQKPGKAPKLLIYDASNLETGVPSRFSGSGSGTDFTLTISSLQPEDFATYYCQQSYNTPPTFGGGTKVEIKTTTPAPRPPTPAPTIASQPLSLRPEACRPAAGGAVHTRGLDFACDIYIWAPLAGTCGVLLLSLVITLYCRRDQRLPPDAHKPPGGGSFRTPIQEEQADAHSTLAKIRVKFSRSADAPAYQQGQNQLYNELNLGRREEYDVLDKRRGRDPEMGGKPRRKNPQEGLYNELQKDKMAEAYSEIGMKGERRRGKGHDGLYQGLSTATKDTYDALHMQALPPRGSGEGRGSLLTCGDVEENPGPMALPVTALLLPLALLLHAARPNWVNVISDLKKIEDLIQSMHIDATLYTESDVHPSCKVTAMKCFLLELQVISLESGDASIHDTVENLIILANNSLSSNGNVTESGCKECEELEEKNIKEFLQSFVHIVQMFINTSTTTPAPRPPTPAPTIASQPLSLRPEACRPAAGGAVHTRGLDFACDIYIWAPLAGTCGVLLLSLVITLYC

SEQ ID NO: 357 - protein, 708 aa, synthetic construct
MALPVTALLLPLALLLHAARPQVQLVQSGAEVKKPGASVKVSCKASGYTFTDSYIHWVRQAPGQGLEWIGWMNPNTGDTGYAQKFQGRVTMTRDTSTSTVYMELSSLRSEDTAVYYCAKDDFGELAPATFDPWGQGTLVTVSSGGGGSGGGGSGGGGSDIQMTQSPSSLSASVGDRVTITCQASQDISNYLNWYQQKPGKAPKLLIYGASSLQSGVPSRFSGSGSGTDFTLTISSLQPEDFATYYCLQDAATPITFGQGTRLEIKTTTPAPRPPTPAPTIASQPLSLRPEACRPAAGGAVHTRGLDFACDIYIWAPLAGTCGVLLLSLVITLYCRRDQRLPPDAHKPPGGGSFRTPIQEEQADAHSTLAKIRVKFSRSADAPAYQQGQNQLYNELNLGRREEYDVLDKRRGRDPEMGGKPRRKNPQEGLYNELQKDKMAEAYSEIGMKGERRRGKGHDGLYQGLSTATKDTYDALHMQALPPRGSGEGRGSLLTCGDVEENPGPMALPVTALLLPLALLLHAARPNWVNVISDLKKIEDLIQSMHIDATLYTESDVHPSCKVTAMKCFLLELQVISLESGDASIHDTVENLIILANNSLSSNGNVTESGCKECEELEEKNIKEFLQSFVHIVQMFINTSTTTPAPRPPTPAPTIASQPLSLRPEACRPAAGGAVHTRGLDFACDIYIWAPLAGTCGVLLLSLVITLYC

SEQ ID NO: 358 - protein, 708 aa, synthetic construct
MALPVTALLLPLALLLHAARPQVQLVQSGAEVKKPGASVKVSCKASGYTFTSYDINWVRQAPGQGLEWMGVISPSGGGTSYAQKFQGRVTMTRDTSTSTVYMELSSLRSEDTAVYYCARYYGGNPEGWYFDLWGRGTLVTVSSGGGGSGGGGSGGGGSDIQMTQSPSSLSASVGDRVTITCRASQSIGNWLAWYQQKPGKAPKLLIYDASDLETGVPSRFSGSGSGTDFTLTISSLQPEDFATYYCQQSYTTPWTFGQGTKVEIKTTTPAPRPPTPAPTIASQPLSLRPEACRPAAGGAVHTRGLDFACDIYIWAPLAGTCGVLLLSLVITLYCRRDQRLPPDAHKPPGGGSFRTPIQEEQADAHSTLAKIRVKFSRSADAPAYQQGQNQLYNELNLGRREEYDVLDKRRGRDPEMGGKPRRKNPQEGLYNELQKDKMAEAYSEIGMKGERRRGKGHDGLYQGLSTATKDTYDALHMQALPPRGSGEGRGSLLTCGDVEENPGPMALPVTALLLPLALLLHAARPNWVNVISDLKKIEDLIQSMHIDATLYTESDVHPSCKVTAMKCFLLELQVISLESGDASIHDTVENLIILANNSLSSNGNVTESGCKECEELEEKNIKEFLQSFVHIVQMFINTSTTTPAPRPPTPAPTIASQPLSLRPEACRPAAGGAVHTRGLDFACDIYIWAPLAGTCGVLLLSLVITLYC

SEQ ID NO: 359 - protein, 723 aa, synthetic construct
MALPVTALLLPLALLLHAARPEVQLLESGGGLVQPGGSLRLSCAASGFVFDDYAIHWVRQAPGKGLEWVAAISYDGSNKYYADSVKGRFTISRDNSKNTLYLQMNSLRAEDTAVYYCARAPQYYGSGTDPLEVRYYYYGMDVWGQGTTVTVSSGGGGSGGGGSGGGGSDIVMTQSPLSLPVTPGEPASISCRSSQSLLHSNGYNYLDWYLQKPGQSPQLLIYEVSNRASGVPDRFSGSGSGTDFTLKISRVEAEDVGVYYCMKGLQTPLTFGPGTKVDIKTTTPAPRPPTPAPTIASQPLSLRPEACRPAAGGAVHTRGLDFACDIYIWAPLAGTCGVLLLSLVITLYCRRDQRLPPDAHKPPGGGSFRTPIQEEQADAHSTLAKIRVKFSRSADAPAYQQGQNQLYNELNLGRREEYDVLDKRRGRDPEMGGKPRRKNPQEGLYNELQKDKMAEAYSEIGMKGERRRGKGHDGLYQGLSTATKDTYDALHMQALPPRGSGEGRGSLLTCGDVEENPGPMALPVTALLLPLALLLHAARPNWVNVISDLKKIEDLIQSMHIDATLYTESDVHPSCKVTAMKCFLLELQVISLESGDASIHDTVENLIILANNSLSSNGNVTESGCKECEELEEKNIKEFLQSFVHIVQMFINTSTTTPAPRPPTPAPTIASQPLSLRPEACRPAAGGAVHTRGLDFACDIYIWAPLAGTCGVLLLSLVITLYC

SEQ ID NO: 360 - protein, 708 aa, synthetic construct
MALPVTALLLPLALLLHAARPQVQLVQSGAEVKKPGSSVKVSCKASGGTFRNYAISWVRQAPGQGLEWMGGIIPIFGTANYAQKFQGRVTITADESTSTAYMELSSLRSEDTAVYYCARDHSAGTHHDAFDIWGQGTMVTVSSGGGGSGGGGSGGGGSDIQMTQSPSSLSASVGDRVTITCRASQGISNYLAWYQQKPGKAPKLLIYAASSLQSGVPSRFSGSGSGTDFTLTISSLQPEDFATYYCQQSHSTPLTFGQGTKVEIKTTTPAPRPPTPAPTIASQPLSLRPEACRPAAGGAVHTRGLDFACDIYIWAPLAGTCGVLLLSLVITLYCRRDQRLPPDAHKPPGGGSFRTPIQEEQADAHSTLAKIRVKFSRSADAPAYQQGQNQLYNELNLGRREEYDVLDKRRGRDPEMGGKPRRKNPQEGLYNELQKDKMAEAYSEIGMKGERRRGKGHDGLYQGLSTATKDTYDALHMQALPPRGSGEGRGSLLTCGDVEENPGPMALPVTALLLPLALLLHAARPNWVNVISDLKKIEDLIQSMHIDATLYTESDVHPSCKVTAMKCFLLELQVISLESGDASIHDTVENLIILANNSLSSNGNVTESGCKECEELEEKNIKEFLQSFVHIVQMFINTSTTTPAPRPPTPAPTIASQPLSLRPEACRPAAGGAVHTRGLDFACDIYIWAPLAGTCGVLLLSLVITLYC

SEQ ID NO: 361 - protein, 703 aa, synthetic construct
MALPVTALLLPLALLLHAARPQVQLVQSGAEVKKPGASVKVSCKASGYTFTSYYIHWVRQAPGQGLEWMGWMNPNSGNAGYAQKFQGRVTMTRDTSTSTVYMELSSLRSEDTAVYYCAREYWGSFDYWGQGTLVTVSSGGGGSGGGGSGGGGSDIQMTQSPSSLSASVGDRVTITCRASQGISNNLNWYQQKPGKAPKLLIYDASNLETGVPSRFSGSGSGTDFTLTISSLQPEDFATYYCQQSYSTPYTFGQGTKVEIKTTTPAPRPPTPAPTIASQPLSLRPEACRPAAGGAVHTRGLDFACDIYIWAPLAGTCGVLLLSLVITLYCRRDQRLPPDAHKPPGGGSFRTPIQEEQADAHSTLAKIRVKFSRSADAPAYQQGQNQLYNELNLGRREEYDVLDKRRGRDPEMGGKPRRKNPQEGLYNELQKDKMAEAYSEIGMKGERRRGKGHDGLYQGLSTATKDTYDALHMQALPPRGSGEGRGSLLTCGDVEENPGPMALPVTALLLPLALLLHAARPNWVNVISDLKKIEDLIQSMHIDATLYTESDVHPSCKVTAMKCFLLELQVISLESGDASIHDTVENLIILANNSLSSNGNVTESGCKECEELEEKNIKEFLQSFVHIVQMFINTSTTTPAPRPPTPAPTIASQPLSLRPEACRPAAGGAVHTRGLDFACDIYIWAPLAGTCGVLLLSLVITLYC

SEQ ID NO: 362 - protein, 704 aa, synthetic construct
MALPVTALLLPLALLLHAARPQVQLVQSGAEVKKPGASVKVSCKASGYTFTGYYMHWVRQAPGQGLEWMGMIDPSDGSTIYAQKFQGRVTMTRDTSTSTVYMELSSLRSEDTAVYYCARERPLYASDLWGQGTLVTVSSGGGGSGGGGSGGGGSDIQMTQSPSSLSASVGDRVTITCRASQDIGNDLGWYQQKPGKAPKLLIYAASSLQSGVPSRFSGSGSGTDFTLTISSLQPEDFATYYCLQDYDYPLTFGQGTKVEIKTTTPAPRPPTPAPTIASQPLSLRPEACRPAAGGAVHTRGLDFACDIYIWAPLAGTCGVLLLSLVITLYCRRDQRLPPDAHKPPGGGSFRTPIQEEQADAHSTLAKIRVKFSRSADAPAYQQGQNQLYNELNLGRREEYDVLDKRRGRDPEMGGKPRRKNPQEGLYNELQKDKMAEAYSEIGMKGERRRGKGHDGLYQGLSTATKDTYDALHMQALPPRGSGEGRGSLLTCGDVEENPGPMALPVTALLLPLALLLHAARPNWVNVISDLKKIEDLIQSMHIDATLYTESDVHPSCKVTAMKCFLLELQVISLESGDASIHDTVENLIILANNSLSSNGNVTESGCKECEELEEKNIKEFLQSFVHIVQMFINTSTTTPAPRPPTPAPTIASQPLSLRPEACRPAAGGAVHTRGLDFACDIYIWAPLAGTCGVLLLSLVITLYC

SEQ ID NO: 363 - protein, 705 aa, synthetic construct
MALPVTALLLPLALLLHAARPQVQLVQSGAEVKKPGSSVKVSCKASGYTFTNYYMHWVRQAPGQGLEWMGWMNPDSGNTGYAQKFQGRVTITADESTSTAYMELSSLRSEDTAVYYCARSSSSWPDFDLWGRGTLVTVSSGGGGSGGGGSGGGGSDIQMTQSPSSLSASVGDRVTITCRASQSISSYLNWYQQKPGKAPKLLIYDASNLETGVPSRFSGSGSGTDFTLTISSLQPEDFATYYCQQSYNTPYSFGQGTKVEIKTTTPAPRPPTPAPTIASQPLSLRPEACRPAAGGAVHTRGLDFACDIYIWAPLAGTCGVLLLSLVITLYCRRDQRLPPDAHKPPGGGSFRTPIQEEQADAHSTLAKIRVKFSRSADAPAYQQGQNQLYNELNLGRREEYDVLDKRRGRDPEMGGKPRRKNPQEGLYNELQKDKMAEAYSEIGMKGERRRGKGHDGLYQGLSTATKDTYDALHMQALPPRGSGEGRGSLLTCGDVEENPGPMALPVTALLLPLALLLHAARPNWVNVISDLKKIEDLIQSMHIDATLYTESDVHPSCKVTAMKCFLLELQVISLESGDASIHDTVENLIILANNSLSSNGNVTESGCKECEELEEKNIKEFLQSFVHIVQMFINTSTTTPAPRPPTPAPTIASQPLSLRPEACRPAAGGAVHTRGLDFACDIYIWAPLAGTCGVLLLSLVITLYC

SEQ ID NO: 364 - protein, 706 aa, synthetic construct
MALPVTALLLPLALLLHAARPQVQLVQSGAEVKKPGASVKVSCKASGYTFTSYSMHWVRQAPGQGLEWVGIINPSSGSASYAQKFQGRVTMTRDTSTSTVYMELSSLRSEDTAVYYCARERGAYSSTFDYWGQGTLVTVSSGGGGSGGGGSGGGGSDIQMTQSPSSLSASVGDRVTITCRTSQSISSYLNWYQQKPGKAPKLLIYDASNLETGVPSRFSGSGSGTDFTLTISSLQPEDFATYYCLQDYSYPLTFGQGTKVEIKTTTPAPRPPTPAPTIASQPLSLRPEACRPAAGGAVHTRGLDFACDIYIWAPLAGTCGVLLLSLVITLYCRRDQRLPPDAHKPPGGGSFRTPIQEEQADAHSTLAKIRVKFSRSADAPAYQQGQNQLYNELNLGRREEYDVLDKRRGRDPEMGGKPRRKNPQEGLYNELQKDKMAEAYSEIGMKGERRRGKGHDGLYQGLSTATKDTYDALHMQALPPRGSGEGRGSLLTCGDVEENPGPMALPVTALLLPLALLLHAARPNWVNVISDLKKIEDLIQSMHIDATLYTESDVHPSCKVTAMKCFLLELQVISLESGDASIHDTVENLIILANNSLSSNGNVTESGCKECEELEEKNIKEFLQSFVHIVQMFINTSTTTPAPRPPTPAPTIASQPLSLRPEACRPAAGGAVHTRGLDFACDIYIWAPLAGTCGVLLLSLVITLYC

SEQ ID NO: 365 - protein, 706 aa, synthetic construct
MALPVTALLLPLALLLHAARPQVQLVQSGAEVKKPGASVKVSCKASGYTFTDYYMHWVRQAPGQGLEWMGVINPSDGTAHYAQRLQGRVTMTRDTSTSTVYMELSSLRSEDTAVYYCARDSGSYYADFDYWGQGTLVTVSSGGGGSGGGGSGGGGSDIQMTQSPSSLSASVGDRVTITCQASQDISNYLNWYQQKPGKAPKLLIYDASSLQSGVPSRFSGSGSGTDFTLTISSLQPEDFATYYCQQSYSTPPAFGQGTKVEIKTTTPAPRPPTPAPTIASQPLSLRPEACRPAAGGAVHTRGLDFACDIYIWAPLAGTCGVLLLSLVITLYCRRDQRLPPDAHKPPGGGSFRTPIQEEQADAHSTLAKIRVKFSRSADAPAYQQGQNQLYNELNLGRREEYDVLDKRRGRDPEMGGKPRRKNPQEGLYNELQKDKMAEAYSEIGMKGERRRGKGHDGLYQGLSTATKDTYDALHMQALPPRGSGEGRGSLLTCGDVEENPGPMALPVTALLLPLALLLHAARPNWVNVISDLKKIEDLIQSMHIDATLYTESDVHPSCKVTAMKCFLLELQVISLESGDASIHDTVENLIILANNSLSSNGNVTESGCKECEELEEKNIKEFLQSFVHIVQMFINTSTTTPAPRPPTPAPTIASQPLSLRPEACRPAAGGAVHTRGLDFACDIYIWAPLAGTCGVLLLSLVITLYC

SEQ ID NO: 366 - protein, 971 aa, synthetic construct
MALPVTALLLPLALLLHAARPQVQLVQSGAEVKKPGASVKVSCKASGYSFTSYYMHWVRQAPGQGLEWMGIINPSGGTTSYAQKFQGRVTMTRDTSTSTVYMELSSLRSEDTAVYYCARDNSPYSSSWWDYFDYWGQGTLVTVSSGGGGSGGGGSGGGGSDIQMTQSPSSLSASVGDRVTITCRASQDIRHYLAWYQQKPGKAPKLLIYDASSLQSGVPSRFSGSGSGTDFTLTISSLQPEDFATYYCQQTYDAPITFGQGTRLEIKGGGGSGGGGSGGGGSQVQLVQSGAEVKKPGASVKVSCKASGYSFTSYYMHWVRQAPGQGLEWMGIINPSGGTTSYAQKFQGRVTMTRDTSTSTVYMELSSLRSEDTAVYYCARDNSPYSSSWWDYFDYWGQGTLVTVSSGGGGSGGGGSGGGGSDIQMTQSPSSLSASVGDRVTITCRASQDIRHYLAWYQQKPGKAPKLLIYDASSLQSGVPSRFSGSGSGTDFTLTISSLQPEDFATYYCQQTYDAPITFGQGTRLEIKTTTPAPRPPTPAPTIASQPLSLRPEACRPAAGGAVHTRGLDFACDIYIWAPLAGTCGVLLLSLVITLYCRRDQRLPPDAHKPPGGGSFRTPIQEEQADAHSTLAKIRVKFSRSADAPAYQQGQNQLYNELNLGRREEYDVLDKRRGRDPEMGGKPRRKNPQEGLYNELQKDKMAEAYSEIGMKGERRRGKGHDGLYQGLSTATKDTYDALHMQALPPRGSGEGRGSLLTCGDVEENPGPMALPVTALLLPLALLLHAARPNWVNVISDLKKIEDLIQSMHIDATLYTESDVHPSCKVTAMKCFLLELQVISLESGDASIHDTVENLIILANNSLSSNGNVTESGCKECEELEEKNIKEFLQSFVHIVQMFINTSTTTPAPRPPTPAPTIASQPLSLRPEACRPAAGGAVHTRGLDFACDIYIWAPLAGTCGVLLLSLVITLYC

SEQ ID NO: 367 - protein, 971 aa, synthetic construct
MALPVTALLLPLALLLHAARPQVQLVQSGAEVKKPGSSVKVSCKASGYTFTSYGISWVRQAPGQGLEWMGGIIPIFGTTNYAQKFQGRVTITADESTSTAYMELSSLRSEDTAVYYCARDHSGDGYFDLWGRGTLVTVSSGGGGSGGGGSGGGGSDIVMTQSPLSLPVTPGEPASISCRSSQSLLHSNGYNYLDWYLQKPGQSPQLLIYDASSLQSGVPDRFSGSGSGTDFTLKISRVEAEDVGVYYCMQGTHWPPTFGQGTKVEIKGGGGSGGGGSGGGGSQVQLVQSGAEVKKPGSSVKVSCKASGYTFTSYGISWVRQAPGQGLEWMGGIIPIFGTTNYAQKFQGRVTITADESTSTAYMELSSLRSEDTAVYYCARDHSGDGYFDLWGRGTLVTVSSGGGGSGGGGSGGGGSDIVMTQSPLSLPVTPGEPASISCRSSQSLLHSNGYNYLDWYLQKPGQSPQLLIYDASSLQSGVPDRFSGSGSGTDFTLKISRVEAEDVGVYYCMQGTHWPPTFGQGTKVEIKTTTPAPRPPTPAPTIASQPLSLRPEACRPAAGGAVHTRGLDFACDIYIWAPLAGTCGVLLLSLVITLYCRRDQRLPPDAHKPPGGGSFRTPIQEEQADAHSTLAKIRVKFSRSADAPAYQQGQNQLYNELNLGRREEYDVLDKRRGRDPEMGGKPRRKNPQEGLYNELQKDKMAEAYSEIGMKGERRRGKGHDGLYQGLSTATKDTYDALHMQALPPRGSGEGRGSLLTCGDVEENPGPMALPVTALLLPLALLLHAARPNWVNVISDLKKIEDLIQSMHIDATLYTESDVHPSCKVTAMKCFLLELQVISLESGDASIHDTVENLIILANNSLSSNGNVTESGCKECEELEEKNIKEFLQSFVHIVQMFINTSTTTPAPRPPTPAPTIASQPLSLRPEACRPAAGGAVHTRGLDFACDIYIWAPLAGTCGVLLLSLVITLYC

SEQ ID NO: 368 - protein, 959 aa, synthetic construct
MALPVTALLLPLALLLHAARPQVQLVQSGAEVKKPGASVKVSCKASGYTFTENEMHWVRQAPGQGLEWMGWINPNSGGTNYAQKFQGRVTMTRDTSTSTVYMELSSLRSEDTAVYYCAGSWGGYYFDYWGQGTLVTVSSGGGGSGGGGSGGGGSDIQMTQSPSSLSASVGDRVTITCRASQSVSRYLNWYQQKPGKAPKLLIYDASNLETGVPSRFSGSGSGTDFTLTISSLQPEDFATYYCQQADSFPVTFGQGTKLEIKGGGGSGGGGSGGGGSQVQLVQSGAEVKKPGASVKVSCKASGYTFTENEMHWVRQAPGQGLEWMGWINPNSGGTNYAQKFQGRVTMTRDTSTSTVYMELSSLRSEDTAVYYCAGSWGGYYFDYWGQGTLVTVSSGGGGSGGGGSGGGGSDIQMTQSPSSLSASVGDRVTITCRASQSVSRYLNWYQQKPGKAPKLLIYDASNLETGVPSRFSGSGSGTDFTLTISSLQPEDFATYYCQQADSFPVTFGQGTKLEIKTTTPAPRPPTPAPTIASQPLSLRPEACRPAAGGAVHTRGLDFACDIYIWAPLAGTCGVLLLSLVITLYCRRDQRLPPDAHKPPGGGSFRTPIQEEQADAHSTLAKIRVKFSRSADAPAYQQGQNQLYNELNLGRREEYDVLDKRRGRDPEMGGKPRRKNPQEGLYNELQKDKMAEAYSEIGMKGERRRGKGHDGLYQGLSTATKDTYDALHMQALPPRGSGEGRGSLLTCGDVEENPGPMALPVTALLLPLALLLHAARPNWVNVISDLKKIEDLIQSMHIDATLYTESDVHPSCKVTAMKCFLLELQVISLESGDASIHDTVENLIILANNSLSSNGNVTESGCKECEELEEKNIKEFLQSFVHIVQMFINTSTTTPAPRPPTPAPTIASQPLSLRPEACRPAAGGAVHTRGLDFACDIYIWAPLAGTCGVLLLSLVITLYC

SEQ ID NO: 369 - protein, 974 aa, synthetic construct
MALPVTALLLPLALLLHAARPQVQLVQSGAEVKKPGASVKVSCKASGYSFTSYYMHWVRQAPGQGLEWMGIINPSGGTTSYAQKFQGRVTMTRDTSTSTVYMELSSLRSEDTAVYYCARDNSPYSSSWWDYFDYWGQGTLVTVSSGGGGSGGGGSGGGGSDIQMTQSPSSLSASVGDRVTITCRASQDIRHYLAWYQQKPGKAPKLLIYDASSLQSGVPSRFSGSGSGTDFTLTISSLQPEDFATYYCQQTYDAPITFGQGTRLEIKGGGGSGGGGSGGGGSQVQLVQSGAEVKKPGSSVKVSCKASGGTFSSYAISWVRQAPGQGLEWMGGITPMFGTTDYAQKFQGRVTITADESTSTAYMELSSLRSEDTAVYYCARDERDGYATVAFDIWGQGTMVTVSSGGGGSGGGGSGGGGSDIVMTQSPLSLPVTPGEPASISCRSSQSLLHSNGYNYLDWYLQKPGQSPQLLIYDASNLETGVPDRFSGSGSGTDFTLKISRVEAEDVGVYYCMQGTHWPPTFGQGTKVEIKTTTPAPRPPTPAPTIASQPLSLRPEACRPAAGGAVHTRGLDFACDIYIWAPLAGTCGVLLLSLVITLYCRRDQRLPPDAHKPPGGGSFRTPIQEEQADAHSTLAKIRVKFSRSADAPAYQQGQNQLYNELNLGRREEYDVLDKRRGRDPEMGGKPRRKNPQEGLYNELQKDKMAEAYSEIGMKGERRRGKGHDGLYQGLSTATKDTYDALHMQALPPRGSGEGRGSLLTCGDVEENPGPMALPVTALLLPLALLLHAARPNWVNVISDLKKIEDLIQSMHIDATLYTESDVHPSCKVTAMKCFLLELQVISLESGDASIHDTVENLIILANNSLSSNGNVTESGCKECEELEEKNIKEFLQSFVHIVQMFINTSTTTPAPRPPTPAPTIASQPLSLRPEACRPAAGGAVHTRGLDFACDIYIWAPLAGTCGVLLLSLVITLYC

SEQ ID NO: 370 - protein, 969 aa, synthetic construct
MALPVTALLLPLALLLHAARPQVQLVQSGAEVKKPGASVKVSCKASGYSFTSYYMHWVRQAPGQGLEWMGIINPSGGTTSYAQKFQGRVTMTRDTSTSTVYMELSSLRSEDTAVYYCARDNSPYSSSWWDYFDYWGQGTLVTVSSGGGGSGGGGSGGGGSDIQMTQSPSSLSASVGDRVTITCRASQDIRHYLAWYQQKPGKAPKLLIYDASSLQSGVPSRFSGSGSGTDFTLTISSLQPEDFATYYCQQTYDAPITFGQGTRLEIKGGGGSGGGGSGGGGSQVQLVQSGAEVKKPGASVKVSCKASGYTFTSYYMHWVRQAPGQGLEWMGIINPSDGGTSYADKFQGRVTMTRDTSTSTVYMELSSLRSEDTAVYYCARALAPLGWGDGMDVWGQGTTVTVSSGGGGSGGGGSGGGGSDIQMTQSPSSLSASVGDRVTITCQASQDISNYLNWYQQKPGKAPKLLIYDASNLETGVPSRFSGSGSGTDFTLTISSLQPEDFATYYCQQSYDGPITFGQGTRLEIKTTTPAPRPPTPAPTIASQPLSLRPEACRPAAGGAVHTRGLDFACDIYIWAPLAGTCGVLLLSLVITLYCRRDQRLPPDAHKPPGGGSFRTPIQEEQADAHSTLAKIRVKFSRSADAPAYQQGQNQLYNELNLGRREEYDVLDKRRGRDPEMGGKPRRKNPQEGLYNELQKDKMAEAYSEIGMKGERRRGKGHDGLYQGLSTATKDTYDALHMQALPPRGSGEGRGSLLTCGDVEENPGPMALPVTALLLPLALLLHAARPNWVNVISDLKKIEDLIQSMHIDATLYTESDVHPSCKVTAMKCFLLELQVISLESGDASIHDTVENLIILANNSLSSNGNVTESGCKECEELEEKNIKEFLQSFVHIVQMFINTSTTTPAPRPPTPAPTIASQPLSLRPEACRPAAGGAVHTRGLDFACDIYIWAPLAGTCGVLLLSLVITLYC

SEQ ID NO: 371 - protein, 974 aa, synthetic construct
MALPVTALLLPLALLLHAARPQVQLVQSGAEVKKPGSSVKVSCKASGYTFTSYGISWVRQAPGQGLEWMGGIIPIFGTTNYAQKFQGRVTITADESTSTAYMELSSLRSEDTAVYYCARDHSGDGYFDLWGRGTLVTVSSGGGGSGGGGSGGGGSDIVMTQSPLSLPVTPGEPASISCRSSQSLLHSNGYNYLDWYLQKPGQSPQLLIYDASSLQSGVPDRFSGSGSGTDFTLKISRVEAEDVGVYYCMQGTHWPPTFGQGTKVEIKGGGGSGGGGSGGGGSQVQLVQSGAEVKKPGSSVKVSCKASGGTFSSYAISWVRQAPGQGLEWMGGITPMFGTTDYAQKFQGRVTITADESTSTAYMELSSLRSEDTAVYYCARDERDGYATVAFDIWGQGTMVTVSSGGGGSGGGGSGGGGSDIVMTQSPLSLPVTPGEPASISCRSSQSLLHSNGYNYLDWYLQKPGQSPQLLIYDASNLETGVPDRFSGSGSGTDFTLKISRVEAEDVGVYYCMQGTHWPPTFGQGTKVEIKTTTPAPRPPTPAPTIASQPLSLRPEACRPAAGGAVHTRGLDFACDIYIWAPLAGTCGVLLLSLVITLYCRRDQRLPPDAHKPPGGGSFRTPIQEEQADAHSTLAKIRVKFSRSADAPAYQQGQNQLYNELNLGRREEYDVLDKRRGRDPEMGGKPRRKNPQEGLYNELQKDKMAEAYSEIGMKGERRRGKGHDGLYQGLSTATKDTYDALHMQALPPRGSGEGRGSLLTCGDVEENPGPMALPVTALLLPLALLLHAARPNWVNVISDLKKIEDLIQSMHIDATLYTESDVHPSCKVTAMKCFLLELQVISLESGDASIHDTVENLIILANNSLSSNGNVTESGCKECEELEEKNIKEFLQSFVHIVQMFINTSTTTPAPRPPTPAPTIASQPLSLRPEACRPAAGGAVHTRGLDFACDIYIWAPLAGTCGVLLLSLVITLYC

SEQ ID NO: 372 - protein, 969 aa, synthetic construct
MALPVTALLLPLALLLHAARPQVQLVQSGAEVKKPGSSVKVSCKASGYTFTSYGISWVRQAPGQGLEWMGGIIPIFGTTNYAQKFQGRVTITADESTSTAYMELSSLRSEDTAVYYCARDHSGDGYFDLWGRGTLVTVSSGGGGSGGGGSGGGGSDIVMTQSPLSLPVTPGEPASISCRSSQSLLHSNGYNYLDWYLQKPGQSPQLLIYDASSLQSGVPDRFSGSGSGTDFTLKISRVEAEDVGVYYCMQGTHWPPTFGQGTKVEIKGGGGSGGGGSGGGGSQVQLVQSGAEVKKPGASVKVSCKASGYTFTSYYMHWVRQAPGQGLEWMGIINPSDGGTSYADKFQGRVTMTRDTSTSTVYMELSSLRSEDTAVYYCARALAPLGWGDGMDVWGQGTTVTVSSGGGGSGGGGSGGGGSDIQMTQSPSSLSASVGDRVTITCQASQDISNYLNWYQQKPGKAPKLLIYDASNLETGVPSRFSGSGSGTDFTLTISSLQPEDFATYYCQQSYDGPITFGQGTRLEIKTTTPAPRPPTPAPTIASQPLSLRPEACRPAAGGAVHTRGLDFACDIYIWAPLAGTCGVLLLSLVITLYCRRDQRLPPDAHKPPGGGSFRTPIQEEQADAHSTLAKIRVKFSRSADAPAYQQGQNQLYNELNLGRREEYDVLDKRRGRDPEMGGKPRRKNPQEGLYNELQKDKMAEAYSEIGMKGERRRGKGHDGLYQGLSTATKDTYDALHMQALPPRGSGEGRGSLLTCGDVEENPGPMALPVTALLLPLALLLHAARPNWVNVISDLKKIEDLIQSMHIDATLYTESDVHPSCKVTAMKCFLLELQVISLESGDASIHDTVENLIILANNSLSSNGNVTESGCKECEELEEKNIKEFLQSFVHIVQMFINTSTTTPAPRPPTPAPTIASQPLSLRPEACRPAAGGAVHTRGLDFACDIYIWAPLAGTCGVLLLSLVITLYC

SEQ ID NO: 373 - protein, 968 aa, synthetic construct
MALPVTALLLPLALLLHAARPQVQLVQSGAEVKKPGASVKVSCKASGYTFTENEMHWVRQAPGQGLEWMGWINPNSGGTNYAQKFQGRVTMTRDTSTSTVYMELSSLRSEDTAVYYCAGSWGGYYFDYWGQGTLVTVSSGGGGSGGGGSGGGGSDIQMTQSPSSLSASVGDRVTITCRASQSVSRYLNWYQQKPGKAPKLLIYDASNLETGVPSRFSGSGSGTDFTLTISSLQPEDFATYYCQQADSFPVTFGQGTKLEIKGGGGSGGGGSGGGGSQVQLVQSGAEVKKPGSSVKVSCKASGGTFSSYAISWVRQAPGQGLEWMGGITPMFGTTDYAQKFQGRVTITADESTSTAYMELSSLRSEDTAVYYCARDERDGYATVAFDIWGQGTMVTVSSGGGGSGGGGSGGGGSDIVMTQSPLSLPVTPGEPASISCRSSQSLLHSNGYNYLDWYLQKPGQSPQLLIYDASNLETGVPDRFSGSGSGTDFTLKISRVEAEDVGVYYCMQGTHWPPTFGQGTKVEIKTTTPAPRPPTPAPTIASQPLSLRPEACRPAAGGAVHTRGLDFACDIYIWAPLAGTCGVLLLSLVITLYCRRDQRLPPDAHKPPGGGSFRTPIQEEQADAHSTLAKIRVKFSRSADAPAYQQGQNQLYNELNLGRREEYDVLDKRRGRDPEMGGKPRRKNPQEGLYNELQKDKMAEAYSEIGMKGERRRGKGHDGLYQGLSTATKDTYDALHMQALPPRGSGEGRGSLLTCGDVEENPGPMALPVTALLLPLALLLHAARPNWVNVISDLKKIEDLIQSMHIDATLYTESDVHPSCKVTAMKCFLLELQVISLESGDASIHDTVENLIILANNSLSSNGNVTESGCKECEELEEKNIKEFLQSFVHIVQMFINTSTTTPAPRPPTPAPTIASQPLSLRPEACRPAAGGAVHTRGLDFACDIYIWAPLAGTCGVLLLSLVITLYC

SEQ ID NO: 374 - protein, 963 aa, synthetic construct
MALPVTALLLPLALLLHAARPQVQLVQSGAEVKKPGASVKVSCKASGYTFTENEMHWVRQAPGQGLEWMGWINPNSGGTNYAQKFQGRVTMTRDTSTSTVYMELSSLRSEDTAVYYCAGSWGGYYFDYWGQGTLVTVSSGGGGSGGGGSGGGGSDIQMTQSPSSLSASVGDRVTITCRASQSVSRYLNWYQQKPGKAPKLLIYDASNLETGVPSRFSGSGSGTDFTLTISSLQPEDFATYYCQQADSFPVTFGQGTKLEIKGGGGSGGGGSGGGGSQVQLVQSGAEVKKPGASVKVSCKASGYTFTSYYMHWVRQAPGQGLEWMGIINPSDGGTSYADKFQGRVTMTRDTSTSTVYMELSSLRSEDTAVYYCARALAPLGWGDGMDVWGQGTTVTVSSGGGGSGGGGSGGGGSDIQMTQSPSSLSASVGDRVTITCQASQDISNYLNWYQQKPGKAPKLLIYDASNLETGVPSRFSGSGSGTDFTLTISSLQPEDFATYYCQQSYDGPITFGQGTRLEIKTTTPAPRPPTPAPTIASQPLSLRPEACRPAAGGAVHTRGLDFACDIYIWAPLAGTCGVLLLSLVITLYCRRDQRLPPDAHKPPGGGSFRTPIQEEQADAHSTLAKIRVKFSRSADAPAYQQGQNQLYNELNLGRREEYDVLDKRRGRDPEMGGKPRRKNPQEGLYNELQKDKMAEAYSEIGMKGERRRGKGHDGLYQGLSTATKDTYDALHMQALPPRGSGEGRGSLLTCGDVEENPGPMALPVTALLLPLALLLHAARPNWVNVISDLKKIEDLIQSMHIDATLYTESDVHPSCKVTAMKCFLLELQVISLESGDASIHDTVENLIILANNSLSSNGNVTESGCKECEELEEKNIKEFLQSFVHIVQMFINTSTTTPAPRPPTPAPTIASQPLSLRPEACRPAAGGAVHTRGLDFACDIYIWAPLAGTCGVLLLSLVITLYC

SEQ ID NO: 375 - DNA, 1472 bp, synthetic construct
  source 1..1472: mol_type = other DNA
atggccttaccagtgaccgccttgctcctgccgctggccttgctgctccacgccgccaggccggatattcagatgacccagagcccgagcagcctgagcgcgagcgtgggcgatcgcgtgaccattacctgccgcgcgagccaggatattagcaaatatctgaactggtatcagcagaaaccgggcggcaccgtgaaactgctgatttatcataccagccgcctgcatagcggcgtgccgagccgctttagcggcagcggcagcggcaccgattttaccctgaccattagcagcctgcagccggaagatattgcgacctatttttgccagcagggcaacaccctgccgtatacctttggcggcggcaccaaactggaaattaccggtggcggtggctcgggcggtggtgggtcgggtggcggcggatctcaggtgcagctgcaggaaagcggcccgggcctggtgaaaccgagccagaccctgagcctgacctgcaccgtgagcggcgtgagcctgccggattatggcgtgagctggattcgccagccgccgggcaaaggcctggaatggattggcgtgatttggggcagcgaaaccacctattataacagcgcgctgaaaagccgcctgaccattagcaaagataacagcaaaaaccaggtgagcctgaaactgagcagcgtgaccgcggcggataccgcggtgtattattgcgcgaaacattattattatggcggcagctatgcgatggattattggggccagggcaccagcgtgaccgtgagcagcaccacgacgccagcgccgcgaccaccaacaccggcgcccaccatcgcgtcgcagcccctgtccctgcgcccagaggcgtgccggccagcggcggggggcgcagtgcacacgagggggctggacttcgcctgtgatatctacatctgggcgcccttggccgggacttgtggggtccttctcctgtcactggttatcaccctttactgcgcttttccgtcgttaagcgggggagaaaaaagctgctgtacattttcaaacagccgtttatgaggccggtccaaacgactcaggaagaagacggctgctcctgccgctttcctgaggaggaggagggcgggtgcgaactgagagtgaagttcagcaggagcgcagacgcccccgcgtaccagcagggccagaaccagctctataacgagctcaatctaggacgaagagaggagtacgatgttttggacaagagacgtggccgggaccctgagatggggggaaagccgagaaggaagaaccctcaggaaggcctgtacaatgaactgcagaaagataagatggcggaggcctacagtgagattgggatgaaaggcgagcgccggaggggcaaggggcacgatggcctttaccagggtctcagtacagccaccaaggacacctacgacgcccttcacatgcaggccctgccccctcgc

SEQ ID NO: 376 - DNA, 1797 bp, synthetic construct
  source 1..1797: mol_type = other DNA
atggccttaccagtgaccgccttgctcctgccgctggccttgctgctccacgccgccaggccgttattcaaccaagaagttcaaattcccttgaccgaaagttactgtggcccatgtcctaaaaactggatatgttacaaaaataactgctaccaattttttgatgagagtaaaaactggtatgagagccaggcttcttgtatgtctcaaaatgccagccttctgaaagtatacagcaaagaggaccaggatttacttaaactggtgaagtcatatcattggatgggactagtacacattccaacaaatggatcttggcagtgggaagatggctccattctctcacccaacctactaacaataattgaaatgcagaagggagactgtgcactctatgcctcgagctttaaaggctatatagaaaactgttcaactccaaatacgtacatctgcatgcaaaggactgtgaccacgacgccagcgccgcgaccaccaacaccggcgcccaccatcgcgtcgcagcccctgtccctgcgcccagaggcgtgccggccagcggcggggggcgcagtgcacacgagggggctggacttcgcctgtgatatctacatctgggcgcccttggccgggacttgtggggtccttctcctgtcactggttatcaccctttactgccggagggaccagaggctgccccccgatgcccacaagccccctgggggaggcagtttccggacccccatccaagaggagcaggccgacgcccactccaccctggccaagatcagagtgaagttcagcaggagcgcagacgcccccgcgtaccagcagggccagaaccagctctataacgagctcaatctaggacgaagagaggagtacgatgttttggacaagagacgtggccgggaccctgagatggggggaaagccgagaaggaagaaccctcaggaaggcctgtacaatgaactgcagaaagataagatggcggaggcctacagtgagattgggatgaaaggcgagcgccggaggggcaaggggcacgatggcctttaccagggtctcagtacagccaccaaggacacctacgacgcccttcacatgcaggccctgccccctcgcggctctggcgagggaaggggttccctgcttacttgcggcgacgtcgaagagaatcccggtccgatggccctcccagtaactgccctccttttgcccctcgcactccttcttcatgccgctcgccccaactgggtcaacgtgattagcgatttgaagaaaatcgaggaccttatacagtctatgcatattgacgctacactgtatactgagagtgatgtacacccgtcctgtaaggtaacggccatgaaatgctttcttctggagctccaggtcatcagcttggagtctggggacgcaagcatccacgatacggttgaaaacctcatcatccttgcgaacaactctctctcatctaatggaaacgttacagagagtgggtgtaaggagtgcgaagagttggaagaaaaaaacatcaaagaatttcttcaatccttcgttcacatagtgcaaatgttcattaacacgtccactaccacacccgccccgaggccacctacgccggcaccgactatcgccagtcaacccctctctctgcgccccgaggcttgccggcctgcggctggtggggcggtccacacccggggcctggattttgcgtgcgatatatacatctgggcacctcttgccggcacctgcggagtgctgcttctctcactcgttattacgctgtactgc

SEQ ID NO: 377 - DNA, 1122 bp, synthetic construct; identical to SEQ ID NO: 145
  source 1..1122: mol_type = other DNA

SEQ ID NO: 378 - DNA, 2118 bp, synthetic construct
  source 1..2118: mol_type = other DNA
atggccttaccagtgaccgccttgctcctgccgctggccttgctgctccacgccgccaggccggatattcagatgacccagagcccgagcagcctgagcgcgagcgtgggcgatcgcgtgaccattacctgccgcgcgagccaggatattagcaaatatctgaactggtatcagcagaaaccgggcggcaccgtgaaactgctgatttatcataccagccgcctgcatagcggcgtgccgagccgctttagcggcagcggcagcggcaccgattttaccctgaccattagcagcctgcagccggaagatattgcgacctatttttgccagcagggcaacaccctgccgtatacctttggcggcggcaccaaactggaaattaccggtggcggtggctcgggcggtggtgggtcgggtggcggcggatctcaggtgcagctgcaggaaagcggcccgggcctggtgaaaccgagccagaccctgagcctgacctgcaccgtgagcggcgtgagcctgccggattatggcgtgagctggattcgccagccgccgggcaaaggcctggaatggattggcgtgatttggggcagcgaaaccacctattataacagcgcgctgaaaagccgcctgaccattagcaaagataacagcaaaaaccaggtgagcctgaaactgagcagcgtgaccgcggcggataccgcggtgtattattgcgcgaaacattattattatggcggcagctatgcgatggattattggggccagggcaccagcgtgaccgtgagcagcaccacgacgccagcgccgcgaccaccaacaccggcgcccaccatcgcgtcgcagcccctgtccctgcgcccagaggcgtgccggccagcggcggggggcgcagtgcacacgagggggctggacttcgcctgtgatatctacatctgggcgcccttggccgggacttgtggggtccttctcctgtcactggttatcaccctttactgccggagggaccagaggctgccccccgatgcccacaagccccctgggggaggcagtttccggacccccatccaagaggagcaggccgacgcccactccaccctggccaagatcagagtgaagttcagcaggagcgcagacgcccccgcgtaccagcagggccagaaccagctctataacgagctcaatctaggacgaagagaggagtacgatgttttggacaagagacgtggccgggaccctgagatggggggaaagccgagaaggaagaaccctcaggaaggcctgtacaatgaactgcagaaagataagatggcggaggcctacagtgagattgggatgaaaggcgagcgccggaggggcaaggggcacgatggcctttaccagggtctcagtacagccaccaaggacacctacgacgcccttcacatgcaggccctgccccctcgcggctctggcgagggaaggggttccctgcttacttgcggcgacgtcgaagagaatcccggtccgatggccctcccagtaactgccctccttttgcccctcgcactccttcttcatgccgctcgccccaactgggtcaacgtgattagcgatttgaagaaaatcgaggaccttatacagtctatgcatattgacgctacactgtatactgagagtgatgtacacccgtcctgtaaggtaacggccatgaaatgctttcttctggagctccaggtcatcagcttggagtctggggacgcaagcatccacgatacggttgaaaacctcatcatccttgcgaacaactctctctcatctaatggaaacgttacagagagtgggtgtaaggagtgcgaagagttggaagaaaaaaacatcaaagaatttcttcaatccttcgttcacatagtgcaaatgttcattaacacgtccactaccacacccgccccgaggccacctacgccggcaccgactatcgccagtcaacccctctctctgcgccccgaggcttgccggcctgcggctggtggggcggtccacacccggggcctggattttgcgtgcgatatatacatctgggcacctcttgccggcacctgcggagtgctgcttctctcactcgttattacgctgtactgc

SEQ ID NO: 379 - DNA, 1443 bp, synthetic construct
  source 1..1443: mol_type = other DNA
atggccttaccagtgaccgccttgctcctgccgctggccttgctgctccacgccgccaggccggatattcagatgacccagagcccgagcagcctgagcgcgagcgtgggcgatcgcgtgaccattacctgccgcgcgagccaggatattagcaaatatctgaactggtatcagcagaaaccgggcggcaccgtgaaactgctgatttatcataccagccgcctgcatagcggcgtgccgagccgctttagcggcagcggcagcggcaccgattttaccctgaccattagcagcctgcagccggaagatattgcgacctatttttgccagcagggcaacaccctgccgtatacctttggcggcggcaccaaactggaaattaccggtggcggtggctcgggcggtggtgggtcgggtggcggcggatctcaggtgcagctgcaggaaagcggcccgggcctggtgaaaccgagccagaccctgagcctgacctgcaccgtgagcggcgtgagcctgccggattatggcgtgagctggattcgccagccgccgggcaaaggcctggaatggattggcgtgatttggggcagcgaaaccacctattataacagcgcgctgaaaagccgcctgaccattagcaaagataacagcaaaaaccaggtgagcctgaaactgagcagcgtgaccgcggcggataccgcggtgtattattgcgcgaaacattattattatggcggcagctatgcgatggattattggggccagggcaccagcgtgaccgtgagcagcaccacgacgccagcgccgcgaccaccaacaccggcgcccaccatcgcgtcgcagcccctgtccctgcgcccagaggcgtgccggccagcggcggggggcgcagtgcacacgagggggctggacttcgcctgtgatatctacatctgggcgcccttggccgggacttgtggggtccttctcctgtcactggttatcaccctttactgccggagggaccagaggctgccccccgatgcccacaagccccctgggggaggcagtttccggacccccatccaagaggagcaggccgacgcccactccaccctggccaagatcagagtgaagttcagcaggagcgcagacgcccccgcgtaccagcagggccagaaccagctctataacgagctcaatctaggacgaagagaggagtacgatgttttggacaagagacgtggccgggaccctgagatggggggaaagccgagaaggaagaaccctcaggaaggcctgtacaatgaactgcagaaagataagatggcggaggcctacagtgagattgggatgaaaggcgagcgccggaggggcaaggggcacgatggcctttaccagggtctcagtacagccaccaaggacacctacgacgcccttcacatgcaggccctgccccctcgc

SEQ ID NO: 380 - protein, 15 aa, synthetic construct
EPKSCDKTHTCPPCP

SEQ ID NO: 381 - protein, 12 aa, synthetic construct
ERKCCVECPPCP

SEQ ID NO: 382 - protein, 60 aa, synthetic construct
ELKTPLGDTHTCPRCPEPKSCDTPPPCPRCPEPKSCDTPPPCPRCPEKSCDTPPPCPRCP

SEQ ID NO: 383 - protein, 12 aa, synthetic construct
ESKYGPPCPSCP

SEQ ID NO: 384 - protein, 12 aa, synthetic construct
ESKYGPPCPPCP

SEQ ID NO: 385 - protein, 9 aa, synthetic construct
YGPPCPPCP

SEQ ID NO: 386 - protein, 10 aa, synthetic construct
KYGPPCPPCP

SEQ ID NO: 387 - protein, 13 aa, synthetic construct
EVVKYGPPCPPCP

SEQ ID NO: 388 - protein, 39 aa, synthetic construct
IEVMYPPPYLDNEKSNGTIIHVKGKHLCPSPLFPGPSKP

SEQ ID NO: 389 - DNA, 20 bp, synthetic construct
  source 1..20: mol_type = other DNA
atcaccaagcccgcgaccaa

SEQ ID NO: 390 - DNA, 612 bp, synthetic construct
  source 1..612: mol_type = other DNA
atggccctcccagtaactgccctccttttgcccctcgcactccttcttcatgccgctcgccccaactgggtcaacgtgattagcgatttgaagaaaatcgaggaccttatacagtctatgcatattgacgctacactgtatactgagagtgatgtacacccgtcctgtaaggtaacggccatgaaatgctttcttctggagctccaggtcatcagcttggagtctggggacgcaagcatccacgatacggttgaaaacctcatcatccttgcgaacaactctctctcatctaatggaaacgttacagagagtgggtgtaaggagtgcgaagagttggaagaaaaaaacatcaaagaatttcttcaatccttcgttcacatagtgcaaatgttcattaacacgtccactaccacacccgccccgaggccacctacgccggcaccgactatcgccagtcaacccctctctctgcgccccgaggcttgccggcctgcggctggtggggcggtccacacccggggcctggattttgcgtgcgatatatacatctgggcacctcttgccggcacctgcggagtgctgcttctctcactcgttattacgctgtactgc

SEQ ID NO: 391 - protein, 204 aa, synthetic construct
MALPVTALLLPLALLLHAARPNWVNVISDLKKIEDLIQSMHIDATLYTESDVHPSCKVTAMKCFLLELQVISLESGDASIHDTVENLIILANNSLSSNGNVTESGCKECEELEEKNIKEFLQSFVHIVQMFINTSTTTPAPRPPTPAPTIASQPLSLRPEACRPAAGGAVHTRGLDFACDIYIWAPLAGTCGVLLLSLVITLYC

SEQ ID NO: 392 - RNA, 20 nt, synthetic construct
  source 1..20: mol_type = other RNA
ccgatcgtgaagcgcctgct

SEQ ID NO: 393 - RNA, 20 nt, synthetic construct
  source 1..20: mol_type = other RNA
cgagaaggcggtcaagagcc

SEQ ID NO: 394 - RNA, 20 nt, synthetic construct
  source 1..20: mol_type = other RNA
cttggtgttgacgttctgcg

SEQ ID NO: 395 - RNA, 20 nt, synthetic construct
  source 1..20: mol_type = other RNA
ctctgctgtttcaccatcca

SEQ ID NO: 396 - RNA, 20 nt, synthetic construct
  source 1..20: mol_type = other RNA
cccggcttgggcggtgctcc

SEQ ID NO: 397 - RNA, 20 nt, synthetic construct
  source 1..20: mol_type = other RNA
cgactaccagttgtccaagc

SEQ ID NO: 398 - RNA, 20 nt, synthetic construct
  source 1..20: mol_type = other RNA
gactgagttattggcgtggc

SEQ ID NO: 399 - RNA, 20 nt, synthetic construct
  source 1..20: mol_type = other RNA
gaatgttccattgataagcc

SEQ ID NO: 400 - RNA, 20 nt, synthetic construct
  source 1..20: mol_type = other RNA
gagaggctgaggtttgcccc

SEQ ID NO: 401 - RNA, 20 nt, synthetic construct
  source 1..20: mol_type = other RNA
cctcaccatgcctagccttt

SEQ ID NO: 402 - RNA, 20 nt, synthetic construct
  source 1..20: mol_type = other RNA
cgatctggggtgggagttcg

SEQ ID NO: 403 - RNA, 20 nt, synthetic construct
  source 1..20: mol_type = other RNA
gtttgaccgctccacgagcc

SEQ ID NO: 404 - RNA, 20 nt, synthetic construct
  source 1..20: mol_type = other RNA
gatacggtaggcgtagatga

SEQ ID NO: 405 - RNA, 20 nt, synthetic construct
  source 1..20: mol_type = other RNA
gattcacaaccgaattggtg

SEQ ID NO: 406 - RNA, 20 nt, synthetic construct
  source 1..20: mol_type = other RNA
gggctcctcggtgtacatca

SEQ ID NO: 407 - RNA, 20 nt, synthetic construct
  source 1..20: mol_type = other RNA
ctatttgcggatcttcctgg

SEQ ID NO: 408 - RNA, 20 nt, synthetic construct
  source 1..20: mol_type = other RNA
gtactcccctgtatcgttca

SEQ ID NO: 409 - RNA, 20 nt, synthetic construct
  source 1..20: mol_type = other RNA
tggggccactcgatccttga

SEQ ID NO: 410 - RNA, 20 nt, synthetic construct
  source 1..20: mol_type = other RNA
acctatcatacgtatcctgg

SEQ ID NO: 411 - RNA, 20 nt, synthetic construct
  source 1..20: mol_type = other RNA
agtgtacgtcccatcagggt

SEQ ID NO: 412 - RNA, 20 nt, synthetic construct
  source 1..20: mol_type = other RNA
atgtggaagtcacgcccgtt

SEQ ID NO: 413 - RNA, 20 nt, synthetic construct
  source 1..20: mol_type = other RNA
gcagttgtgtgacacggaag

SEQ ID NO: 414 - RNA, 20 nt, synthetic construct
  source 1..20: mol_type = other RNA
cagcttgtccaactggtcgg

SEQ ID NO: 415 - RNA, 20 nt, synthetic construct
  source 1..20: mol_type = other RNA
agttgagctggcaatcaggg

SEQ ID NO: 416 - RNA, 20 nt, synthetic construct
  source 1..20: mol_type = other RNA
agaagtggaatacagagcgg

SEQ ID NO: 417 - RNA, 20 nt, synthetic construct
  source 1..20: mol_type = other RNA
aatgtgactctagcagacag

SEQ ID NO: 418 - RNA, 20 nt, synthetic construct
  source 1..20: mol_type = other RNA
ctaaatggggatttccgcaa

SEQ ID NO: 419 - RNA, 20 nt, synthetic construct
  source 1..20: mol_type = other RNA
gagtcacattctctatggtc

SEQ ID NO: 420 - RNA, 20 nt, synthetic construct
  source 1..20: mol_type = other RNA
tgtacttgacgcatcgcgcc

SEQ ID NO: 421 - RNA, 20 nt, synthetic construct
  source 1..20: mol_type = other RNA
tactgacgccaagacagagt

SEQ ID NO: 422 - RNA, 20 nt, synthetic construct
  source 1..20: mol_type = other RNA
tatcagccactaatgaagtt

SEQ ID NO: 423 - RNA, 20 nt, synthetic construct
  source 1..20: mol_type = other RNA
tgtagactgccaaagtgtat

SEQ ID NO: 424 - protein, 107 aa, synthetic construct [sequence omitted]

SEQ ID NO: 425 - protein, 122 aa, synthetic construct [sequence omitted]

SEQ ID NO: 426 - protein, 398 aa, synthetic construct
YVMDFQVQIFSFLLISASVIMSRGEIVLTQSPATLSLSPGERATLSCRASQSVSSYLAWYQQKPGQAPRLLIYDASNRATGIPARFSGSGSGTDFTLTISSLEPEDFAVYYCQQRSNWPPTFGQGTKVEIKGSTSGSGKSSEGKGEVQLLESGGGLVQPGGSLRLSCAVSGFTFNSFAMSWVRQAPGKGLEWVSAISGSGGGTYYADSVKGRFTISRDNSKNTLYLQMNSLRAEDTAVYFCAKDKILWFGEPVFDYWGQGTLVTVSSLSNSIMYFSHFVPVFLPAKPTTTPAPRPPTPAPTIASQPLSLRPEACRPAAGGAVHTRGLDFACDIYIWAPLAGTCGVLLLSLVITLYCNHRSQVRKAAITSYEKSDGVYTGLSTRNQETYETLKHEKPPQ

SEQ ID NO: 427 - protein, 6 aa, synthetic construct
QSVSSY

SEQ ID NO: 428 - skipped

SEQ ID NO: 429 - protein, 9 aa, synthetic construct
QQRSNWPPT

SEQ ID NO: 430 - protein, 8 aa, synthetic construct
GFTFNSFA

SEQ ID NO: 431 - protein, 9 aa, synthetic construct
ISGSGGGTY

SEQ ID NO: 432 - protein, 15 aa, synthetic construct
AKDKILWFGEPVFDY

SEQ ID NO: 433 - protein, 243 aa, synthetic construct
DIQMTQSTSSLSASLGDRVTISCSASQGINNYLNWYQQKPDGTVELLIYYTSTLQSGVPSRFSGSGSGTDYSLTISNLEPEDIGTYYCQQYSKLPRTFGGGTKLEIKGSTSGSGKSSEGKGQVQLQQSGSELMMPGASVKISCKATGYTFSNYWIEWVKQRPGHGLEWIGEILPGTGRTIYNEKFKGKATFTADISSNTVQMQLSSLTSEDSAVYYCARRDYYGNFYYAMDYWGQGTSVTVSS

SEQ ID NO: 434 - protein, 107 aa, synthetic construct
DIQMTQSTSSLSASLGDRVTISCSASQGINNYLNWYQQKPDGTVELLIYYTSTLQSGVPSRFSGSGSGTDYSLTISNLEPEDIGTYYCQQYSKLPRTFGGGTKLEIK

SEQ ID NO: 435 - protein, 122 aa, synthetic construct
QVQLQQSGSELMMPGASVKISCKATGYTFSNYWIEWVKQRPGHGLEWIGEILPGTGRTIYNEKFKGKATFTADISSNTVQMQLSSLTSEDSAVYYCARRDYYGNFYYAMDYWGQGTSVTVSS

SEQ ID NO: 436 - protein, 353 aa, synthetic construct
MDFQVQIFSFLLISASVIMSRGDIQMTQSTSSLSASLGDRVTISCSASQGINNYLNWYQQKPDGTVELLIYYTSTLQSGVPSRFSGSGSGTDYSLTISNLEPEDIGTYYCQQYSKLPRTFGGGTKLEIKGSTSGSGKSSEGKGQVQLQQSGSELMMPGASVKISCKATGYTFSNYWIEWVKQRPGHGLEWIGEILPGTGRTIYNEKFKGKATFTADISSNTVQMQLSSLTSEDSAVYYCARRDYYGNFYYAMDYWGQGTSVTVSSAAAKGKHLCPSPLFPGPSKPFWVLVVVGGVLACYSLLVTVAFIIFWVRSKRSRLLHSDYMNMTPRRPGPTRKHYQPYAPPRDFAAYRS

SEQ ID NO: 437 - protein, 6 aa, synthetic construct
QGINNY

SEQ ID NO: 438 - skipped

SEQ ID NO: 439 - protein, 9 aa, synthetic construct
QQYSKLPRT

SEQ ID NO: 440 - protein, 8 aa, synthetic construct
GYTFSNYW

SEQ ID NO: 441 - protein, 9 aa, synthetic construct
ILPGTGRTI

SEQ ID NO: 442 - protein, 15 aa, synthetic construct
ARRDYYGNFYYAMDY

SEQ ID NO: 443 - protein, 243 aa, synthetic construct; identical to SEQ ID NO: 433

SEQ ID NO: 444 - protein, 353 aa, synthetic construct; identical to SEQ ID NO: 436

SEQ ID NO: 445 - RNA, 20 nt, synthetic construct
  source 1..20: mol_type = other RNA
tgggcagtcctattacagct

SEQ ID NO: 446 - RNA, 20 nt, synthetic construct
  source 1..20: mol_type = other RNA
atgatagtcactgacaacaa

SEQ ID NO: 447 - RNA, 20 nt, synthetic construct
  source 1..20: mol_type = other RNA
agttgctcatgcaggatttc

SEQ ID NO: 448 - RNA, 20 nt, synthetic construct
  source 1..20: mol_type = other RNA
gaagccacaggaagtctgtg

SEQ ID NO: 449 - RNA, 20 nt, synthetic construct
  source 1..20: mol_type = other RNA
gaagctcattgttgggatcc

SEQ ID NO: 450 - RNA, 20 nt, synthetic construct
  source 1..20: mol_type = other RNA
aacaactatcgttaccacag

SEQ ID NO: 451 - RNA, 20 nt, synthetic construct
  source 1..20: mol_type = other RNA
tgaacaggaaataacctatg

SEQ ID NO: 452 - RNA, 20 nt, synthetic construct
  source 1..20: mol_type = other RNA
ggttttcgttgctgcctctt

SEQ ID NO: 453 - RNA, 20 nt, synthetic construct
  source 1..20: mol_type = other RNA
tccccgaaaaggtcgaattt

SEQ ID NO: 454 - RNA, 20 nt, synthetic construct
  source 1..20: mol_type = other RNA
atctgcggcagcttgcttag

SEQ ID NO: 455 - RNA, 20 nt, synthetic construct
  source 1..20: mol_type = other RNA
gggtattattgatgctattc

SEQ ID NO: 456 - RNA, 20 nt, synthetic construct
  source 1..20: mol_type = other RNA
gatttcctcctcgaccacca

SEQ ID NO: 457 - RNA, 20 nt, synthetic construct
  source 1..20: mol_type = other RNA
cttcgaatcgaataccaaga

SEQ ID NO: 458 - RNA, 20 nt, synthetic construct
  source 1..20: mol_type = other RNA
gcttaaacaatttgacagtg

SEQ ID NO: 459 - RNA, 20 nt, synthetic construct
  source 1..20: mol_type = other RNA
ccaagacggaaaattcagat

SEQ ID NO: 460 - RNA, 20 nt, synthetic construct
  source 1..20: mol_type = other RNA
ccaatctgaattttccgtct

SEQ ID NO: 461 - RNA, 20 nt, synthetic construct
  source 1..20: mol_type = other RNA
cggtccagctgacgtcttaa

SEQ ID NO: 462 - RNA, 20 nt, synthetic construct
  source 1..20: mol_type = other RNA
catcttggtactcaatccgc

SEQ ID NO: 463 - RNA, 20 nt, synthetic construct
  source 1..20: mol_type = other RNA
gcacctacagaagatgccgg

SEQ ID NO: 464 - RNA, 20 nt, synthetic construct
  source 1..20: mol_type = other RNA
gacagcgtgaacaggtagct

SEQ ID NO: 465 - RNA, 20 nt, synthetic construct
  source 1..20: mol_type = other RNA
gacagcgtgaacaggtagct

SEQ ID NO: 466 - RNA, 20 nt, synthetic construct
  source 1..20: mol_type = other RNA
actcaatgcgtacattggtg

SEQ ID NO: 467 - RNA, 20 nt, synthetic construct
  source 1..20: mol_type = other RNA
ttgccggctgagaaccagat

SEQ ID NO: 468 - RNA, 20 nt, synthetic construct
  source 1..20: mol_type = other RNA
gagaagtagcagccatgtac

SEQ ID NO: 469 - RNA, 20 nt, synthetic construct
  source 1..20: mol_type = other RNA
gcccataggtgaaggcgtct

SEQ ID NO: 470 - RNA, 20 nt, synthetic construct
  source 1..20: mol_type = other RNA
ccaatcatgctgctggtgga

SEQ ID NO: 471 - protein, 118 aa, synthetic construct
EVQLQQSGPELVKPGASVKMSCKASGYTFTSYVMHWVKQKPGQGPDWIGYINPYNDATKYNEKFKGKATLTSDKSSSTAYMELSSLTSEDSAVYYCARGGYDYDGDYWGQGTTLTVSS

SEQ ID NO: 472 - protein, 122 aa, synthetic construct
EVQLQQSGPELVKPGASVKMSCKASGYTFTRYILHWVKLKPGQGLEWIGYINPYNDGTKYNEKFKGKATLTSDKSSSTAYMELSRLTSYDSAVYYCARDSSGYGGAYAMDFWGQGTSVTVSS

SEQ ID NO: 473 - protein, 120 aa, synthetic construct
EVQLVESGGGLVKPGGSLKLSCAASGFTFSSYAMSWVRQTPEKRLEWVAAINSNGGNTYYPDTVKDRFTISRDNAKNTLYLQMSSLRSEDTALYYCARHRGGFYYAVDYWGQGTSVTVSS

SEQ ID NO: 474 - protein, 116 aa, synthetic construct
EVQLQQSGPELVKPGASVKISCKASGYSFTGYYIDWVKQSPGKSLEWIGYIYPSNGETSYNQKFKGKATLTVDKSSSTVNMQLNSLTSEDSAVYYCARESYAMDYWGQGTSVTVSS

SEQ ID NO: 475 - protein, 119 aa, synthetic construct
DVQLQESGPGLVKPSQTVSLTCTVTGYSITNGNHWWSWIRQVSGSKLEWMGYISSSGSTDSNPSLKSRISITRDTSKNQLFLHLNSVTTEDIATYYCATTGTWGYFDYWGQGTTLTVSS

SEQ ID NO: 476 - protein, 118 aa, synthetic construct
EVQLQQSGPELVKPGTSVKMSCKASGYTFTSYVMHWVKQKPGQGLEWIGYVIPYNDGTKYNEKFKGKATLTSDKSSSTAYMELSSLTSEDSAVYYCARPSNWDEFDYWGQGTTLTVSS

SEQ ID NO: 477 - protein, 116 aa, synthetic construct
QVQLQQPGAELVKPGASVKLSCKASGYTFTNYWMNWVKQRPGRGLEWIGRIHPSDSETHYNQKFKTKATLTVDKSSSTAYIQLSSLTSEDSAVYYCARYDGYFAYWGQGTLVTVSA

SEQ ID NO: 478 - protein, 120 aa, synthetic construct
QVTLKESGPGILQPSQTLSLTCSFSGFSLSTFGMGVGWIRQPSGKGLEWLAHIWWDDDKYYNPALKSRLTISKDTSKNQVFLKIANVDIADTATYYCARTYDYDEYFDYWGQGTTLTVSS

SEQ ID NO: 479 - protein, 119 aa, synthetic construct
QVQLQQPGAELVQPGASVKLSCKASGYTFTSYWMNWMKQRPGRGLEWIGRIHPSDSETHYNQKFRTKATLTVDKSSSTAYIQLSSLTSEDSAVYYCAREDGYYWYFDVWGAGTTVTVSS

SEQ ID NO: 480 - protein, 117 aa, synthetic construct
EVQLQQSGAELVKPGASVKIPCKASGYKFTDFNMDWVKQSHGKSLEWIGDINPNSGGTIYNQKFKGKATLTVDKSLSTAYMELGSLTSEDTAVYYCARWDYGNFAYWGQGTLVTVSA

SEQ ID NO: 481 - protein, 119 aa, synthetic construct
QVQLQQPGAELVKPGASVKLSCKASGYTFTNYWMNWVKQRPGRGLEWIGRIHPSDSETHYNQKFKSKATLTVDKSSSTAYIQLSSLTSEDSAVYYCAREDGYYWYFDVWGAGTTVTVSS

SEQ ID NO: 482 - protein, 120 aa, synthetic construct
EVQLVESGGGLVKPGGSLKLSCAASGFTFSSYAMSWVRQTPEKRLEWVAAINSNGGRNYYPDTVKDRFTISRDNAKNTLYLQMSSLRSEDTALYYCARHRGGYYYAMDYWGQGTSVTVSS

SEQ ID NO: 483 - protein, 107 aa, synthetic construct
DIQMNQSPSSLSASLGDSITITCHASQNINVWLSWYQQKPGNIPKLLIYKASNLHTGVPSRFSGSGSGTGFTLTISSLQPEDIATYYCQQGQSYPFTFGSGTKLEIK

SEQ ID NO: 484 - protein, 107 aa, synthetic construct
DIQMTQSPASLSASVGETVTITCRASGNIHNYLAWYQQKQGRSPQLLVYNAKTLPYGVPSRFSGSGSGTQYSLKINSLQPEDFGSYYCQHFWTTPWTFGGGTKLEIK

SEQ ID NO: 485 - protein, 112 aa, synthetic construct
NIMMTQSPSSLAVSAGEKVTMSCKSSQSVLYSSNQKNYLAWYQQKPGQSPKLLIYWASTRESGVPDRFTGSGSGTDFTLTISSVQAEDLAVYYCHQYLSSRTFGGGTKLEIK

SEQ ID NO: 486 - protein, 111 aa, synthetic construct
DIVLTQSPASLAVSLGQRATISCRASKSVSTSGYSYMHWYQQKPGQPPKLLIYLASNLESGVPARFSGSGSGTDFTLNIHPVEEEDAATYYCQHSRELPYTFGGGTKLEIK

SEQ ID NO: 487 - protein, 107 aa, synthetic construct
NIVMTQSPKSMSMSVGERVTLSCKASENVGTYVSWYQQKPEQSPKLLIYGASNRFTGVPDRFTGSGSATDFTLTISSVQAEDLADYHCGQSYSYPFTFGSGTKLEIK

SEQ ID NO: 488 - protein, 107 aa, synthetic construct
DIVMTQSQKFMSTSVGDRVSITCKASQNVRTAVAWYQQKPGQSPKALIYLASNRHTGVPDRFTGSGSGTDFTLTISNVQSEDLADYFCLQHWNYPLTFGAGTKLELK

SEQ ID NO: 489 - protein, 107 aa, synthetic construct
DIQMTQSSSYLSVSLGGRVTITCKASDHINNWLAWYQQKPGNAPRLLISGATSLETGDPSRFSGSGSGKDYTLSITSLQIEDVATYYCQQYWSIPFTFGAGTKLELK

SEQ ID NO: 490 - protein, 112 aa, synthetic construct
DIVMTQAAFSNPVTLGTSASISCRSSKSLLHSNGITYFYWYLQKPGQSPQLLIYQMSNLASGVPDRFSSSGSGTDFTLRISRVEAEDVGVYYCAQNLELPFTFGSGTKLEIK

SEQ ID NO: 491 - protein, 111 aa, synthetic construct
NIVLTQSPASLAVSLGQRATISCRASESVDIYGNSFMHWYQQKPGQPPKLLIYLASNLESGVPARFSGSGSRTDFTLTIDPVEADDAATYYCQQNNEDPWTFGGGTKLEIK

SEQ ID NO: 492 - protein, 112 aa, synthetic construct
DIVMTQAAFSNPVTLGTSASISCRSSKSLLHSNGITYLYWYLQKPGQSPQLLIYQMSNLASGVPDRFSSSGSGTDFTLRISRVEAEDVGVYYCAQNLELPLTFGAGTKLELK

SEQ ID NO: 493 - protein, 111 aa, synthetic construct
NIVLTQSPASLAVSLGQRATISCRASESVDSYGNSFMHWYQQKPGQPPKLLIYLASNLESGVPARFSGSGSRTDFTLTIDPVEADDAATYYCQQNHEDPWTFGGGTKLEIK

SEQ ID NO: 494 - protein, 112 aa, synthetic construct
DIVMSQSPSSLAVSVGEKVTMSCKSSQSLLYSSNQKNYLAWYQQKPGQSPKLLIYWASTRESGVPDRFTGSGSGTDFTLTISSVKAEDLAVYYCQQYYTYLTFGAGTKLELK

SEQ ID NO: 495 - protein, 918 aa, synthetic construct
MALPVTALLLPLALLLHAARPDIQMTQSPSSLSASVGDRVTITCSASSSVSYMYWYQQKPGKAPKLLIYLTSNLASGVPSRFSGSGSGTDFTLTISSLQPEDFATYYCQQWRSNPFTFGQGTKLEIKRGGGGSGGGGSGGGGSQITLKESGPTLVKPTQTLTLTCTFSGFSLSTSGMGVGWIRQPPGKALEWLAHIWWDDVKRYSPSLKSRLTITKDTSKNQVVLTMTNMDPVDTATYYCARIVSFDNDVVSAMDYWGQGTLVTVSSTREQKLISEEDLAKPTTTPAPRPPTPAPTIASQPLSLRPEACRPAAGGAVHTRGLDFACDIYIWAPLAGTCGVLLLSLVITLYCGRARVKFSRSADAPAYQQGQNQLYNELNLGRREEYDVLDKRRGRDPEMGGKPRRKNPQEGLYNELQKDKMAEAYSEIGMKGERRRGKGHDGLYQGLSTATKDTYDALHMQALPPRSRGSGATNFSLLKQAGDVEENPGPGIHMATYEVLCEVARKLGTDDREVVLFLLNVFIPQPTLAQLIGALRALKEEGRLTFPLLAECLFRAGRRDLLRDLLHLDPRFLERHLAGTMSYFSPYQLTVLHVDGELCARDIRSLIFLSKDTIGSRSTPQTFLHWVYCMENLDLLGPTDVDALMSMLRSLSRVDLQRQVQTLMGLHLSGPSHSQHYRHTPLETDFYDYKDDDDKTSGSGEGRGSLLTCGDVEENPGPHMTEYKPTVRLATRDDVPRAVRTLAAAFADYPATRHTVDPDRHIERVTELQELFLTRVGLDIGKVWVADDGAAVAVWTTPESVEAGAVFAEIGPRMAELSGSRLAAQQQMEGLLAPHRPKEPAWFLATVGVSPDHQGKGLGSAVVLPGVEAAERAGVPAFLETSAPRNLPFYERLGFTVTADVEVPEGPRTWCMTRKPGA

SEQ ID NO: 496 - protein, 913 aa, synthetic construct
MALPVTALLLPLALLLHAARPEIVMTQSPATLSVSPGERATLSCKASQSVSNDVVWYQQKPGQAPRLLIYYASNRYTGIPARFSGSGSGTEFTLTISSLQSEDFAVYYCQQDYTSPWTFGQGTKLEIKRGGGGSGGGGSGGGGSQVQLVQSGAEVKKPGASVKVSCKASGYTFTNYGMNWVRQAPGQGLEWMGWINTYTGEPTYADDFKGRVTMTTDTSTSTAYMELRSLRSDDTAVYYCARIGDSSPSDYWGQGTLVTVSSTREQKLISEEDLAKPTTTPAPRPPTPAPTIASQPLSLRPEACRPAAGGAVHTRGLDFACDIYIWAPLAGTCGVLLLSLVITLYCGRARVKFSRSADAPAYQQGQNQLYNELNLGRREEYDVLDKRRGRDPEMGGKPRRKNPQEGLYNELQKDKMAEAYSEIGMKGERRRGKGHDGLYQGLSTATKDTYDALHMQALPPRSRGSGATNFSLLKQAGDVEENPGPGIHMATYEVLCEVARKLGTDDREVVLFLLNVFIPQPTLAQLIGALRALKEEGRLTFPLLAECLFRAGRRDLLRDLLHLDPRFLERHLAGTMSYFSPYQLTVLHVDGELCARDIRSLIFLSKDTIGSRSTPQTFLHWVYCMENLDLLGPTDVDALMSMLRSLSRVDLQRQVQTLMGLHLSGPSHSQHYRHTPLETDFYDYKDDDDKTSGSGEGRGSLLTCGDVEENPGPHMTEYKPTVRLATRDDVPRAVRTLAAAFADYPATRHTVDPDRHIERVTELQELFLTRVGLDIGKVWVADDGAAVAVWTTPESVEAGAVFAEIGPRMAELSGSRLAAQQQMEGLLAPHRPKEPAWFLATVGVSPDHQGKGLGSAVVLPGVEAAERAGVPAFLETSAPRNLPFYERLGFTVTADVEVPEGPRTWCMTRKPGA

SEQ ID NO: 497 - DNA, 738 bp, synthetic construct
  source 1..738: mol_type = other DNA
gacatccagatgacccagagccccagcagcctgtctgccagcgtgggcgacagagtgaccatcacctgtagcgccagcagcagcgtgtcctacatgtactggtatcagcagaagcccggcaaggcccccaagctgctgatctacctgaccagcaatctggcctccggcgtgcccagcagattttctggcagcggctccggcaccgacttcaccctgacaatcagctccctccagcccgaggacttcgccacctactactgtcagcagtggcggagcaaccccttcaccttcggccagggcaccaagctggaaatcaagagaggcggaggcggaagtggaggcggaggatctggcggcggaggctctcagatcaccctgaaagagtccggccccaccctcgtgaagcctacccagaccctgacactgacctgcaccttcagcggcttcagcctgagcacaagcggcatgggcgtgggctggatcagacagcctcctggaaaggccctggaatggctggcccacatttggtgggacgacgtgaagcggtacagccccagcctgaagtcccggctgaccattaccaaggacaccagcaagaaccaggtggtgctgaccatgacaaacatggaccccgtggacaccgccacatattactgcgcccggatcgtgtccttcgacaacgacgtggtgtccgctatggactactggggccagggaaccctcgtgaccgtgtctagt

SEQ ID NO: 498 - DNA, 723 bp, synthetic construct
  source 1..723: mol_type = other DNA
gagatcgtgatgacccagagccctgccaccctgtccgtgtctccaggcgaaagagccaccctgagctgcaaggcttcccagagcgtgtccaacgacgtcgtgtggtatcagcagaagcccggccaggcccccagactgctgatctactacgccagcaacagatacaccggcatccccgccagattcagcggctctggcagcggcaccgagttcaccctgacaatcagcagcctccagagcgaggacttcgccgtgtactactgtcagcaggactacaccagcccctggaccttcggccagggcaccaagctggaaatcaagagaggcggaggcggaagtggaggcggaggatctggcggcggaggctctcaggtgcaactggtgcagagcggagccgaagtgaagaaacctggggccagcgtgaaggtgtcctgcaaggccagcggctacacctttaccaactacggcatgaactgggtgcgccaggctcctggacagggcctggaatggatgggctggatcaacacctacaccggcgagcccacctacgccgacgacttcaagggcagagtgaccatgaccaccgacaccagcacctccaccgcctacatggaactgcggagcctgagaagcgacgacaccgccgtgtattattgcgcccggatcggcgacagcagccccagcgattattggggccagggaaccctcgtgaccgtgtcctct

SEQ ID NO: 499 - protein, 246 aa, synthetic construct
DIQMTQSPSSLSASVGDRVTITCSASSSVSYMYWYQQKPGKAPKLLIYLTSNLASGVPSRFSGSGSGTDFTLTISSLQPEDFATYYCQQWRSNPFTFGQGTKLEIKRGGGGSGGGGSGGGGSQITLKESGPTLVKPTQTLTLTCTFSGFSLSTSGMGVGWIRQPPGKALEWLAHIWWDDVKRYSPSLKSRLTITKDTSKNQVVLTMTNMDPVDTATYYCARIVSFDNDVVSAMDYWGQGTLVTVSS

SEQ ID NO: 500 - protein, 241 aa, synthetic construct
EIVMTQSPATLSVSPGERATLSCKASQSVSNDVVWYQQKPGQAPRLLIYYASNRYTGIPARFSGSGSGTEFTLTISSLQSEDFAVYYCQQDYTSPWTFGQGTKLEIKRGGGGSGGGGSGGGGSQVQLVQSGAEVKKPGASVKVSCKASGYTFTNYGMNWVRQAPGQGLEWMGWINTYTGEPTYADDFKGRVTMTTDTSTSTAYMELRSLRSDDTAVYYCARIGDSSPSDYWGQGTLVTVSS

SEQ ID NO: 501 - protein, 118 aa, synthetic construct
QVQLQQSGSEMARPGASVKLPCKASGDTFTSYWMHWVKQRHGHGPEWIGNIYPGSGGTNYAEKFKNKVTLTVDRSSRTVYMHLSRLTSEDSAVYYCTRSGGPYFFDYWGQGTTLTVSS

SEQ ID NO: 502 - protein, 115 aa, synthetic construct
DILMTQSPLSLPVSLGDQASISCRSSQNIVHNNGITYLEWYLQRPGQSPKLLIYKVSDRFSGVPDRFSGSGSGTDFTLKISRVEAEDLGIYYCFQGSHIPPTFGGGTKLEIKRAA

SEQ ID NO: 503 - protein, 486 aa, synthetic construct
MGGLEPCSRFLLLPLLLAVSGLRPVQVQAQSDCSCSTVSPGVLAGIVMGDLVLTVLIALAVYFLGRLVPRGRGAAEAATRKQRITETESPYQELQGQRSDVYSDLNTQRPYYKVEGGGEGRGSLLTCGDVEENPGPRMALPVTALLLPLALLLHAARPGSDVQLQESGPSLVKPSQSLSLTCTVTGYSITSDFAWNWIRQFPGNKLEWMGYISYSGNTRYNPSLKSRISITRDTSKNQFFLQLNSVTIEDTATYYCVTAGRGFPYWGQGTLVTVSAGGGGSGGGGSSGGGSDILMTQSPSSMSVSLGDTVSITCHSSQDINSNIGWLQQRPGKSFKGLIYHGTNLDDEVPSRFSGSGSGADYSLTISSLESEDFADYYCVQYAQFPWTFGGGTKLEIKRASGGGGSGGGGSSPTEPSSKTGNPRHLHVLIGTSVVKIPFTILLFFLLHRWCSNKKNAAVMDQEPAGNRTVNSEDSDEQDHQEVSYA

SEQ ID NO: 504 - protein, 483 aa, synthetic construct
MALPVTALLLPLALLLHAARPDVQLQESGPSLVKPSQSLSLTCTVTGYSITSDFAWNWIRQFPGNKLEWMGYISYSGNTRYNPSLKSRISITRDTSKNQFFLQLNSVTIEDTATYYCVTAGRGFPYWGQGTLVTVSAGGGGSGGGGSSGGGSDILMTQSPSSMSVSLGDTVSITCHSSQDINSNIGWLQQRPGKSFKGLIYHGTNLDDEVPSRFSGSGSGADYSLTISSLESEDFADYYCVQYAQFPWTFGGGTKLEIKRTTTPAPRPPTPAPTIASQPLSLRPEACRPAAGGAVHTRGLDFACDIYIWAPLAGTCGVLLLSLVITLYCKRGRKKLLYIFKQPFMRPVQTTQEEDGCSCRFPEEEEGGCELRVKFSRSADAPAYQQGQNQLYNELNLGRREEYDVLDKRRGRDPEMGGKPRRKNPQEGLYNELQKDKMAEAYSEIGMKGERRRGKGHDGLYQGLSTATKDTYDALHMQALPPR

SEQ ID NO: 505 - protein, 483 aa, synthetic construct
MALPVTALLLPLALLLHAARPQVQLQESGPGLVKPSQTLSLTCTVSGYSISSDFAWNWIRQPPGKGLEWMGYISYSGNTRYQPSLKSRITISRDTSKNQFFLKLNSVTAADTATYYCVTAGRGFPYWGQGTLVTVSSGGGGSGGGGSSGGGSDIQMTQSPSSMSVSVGDRVTITCHSSQDINSNIGWLQQKPGKSFKGLIYHGTNLDDGVPSRFSGSGSGTDYTLTISSLQPEDFATYYCVQYAQFPWTFGGGTKLEIKRTTTPAPRPPTPAPTIASQPLSLRPEACRPAAGGAVHTRGLDFACDIYIWAPLAGTCGVLLLSLVITLYCKRGRKKLLYIFKQPFMRPVQTTQEEDGCSCRFPEEEEGGCELRVKFSRSADAPAYQQGQNQLYNELNLGRREEYDVLDKRRGRDPEMGGKPRRKNPQEGLYNELQKDKMAEAYSEIGMKGERRRGKGHDGLYQGLSTATKDTYDALHMQALPPR

SEQ ID NO: 506 - protein, 482 aa, synthetic construct
MALPVTALLLPLALLLHAARPEVQLQESGPGLVKPSQTLSLTCTVSGYSISRDFAWNWIRQPPGKGLEWMGYISYNGNTRYQPSLKSRITISRDTSKNQFFLKLNSVTAADTATYYCVTASRGFPYWGQGTLVTVSSGGGGSGGGGSSGGGSDIQMTQSPSSMSVSVGDRVTITCHSSQDINSNIGWLQQKPGKSFKGLIYHGTNLDDGVPSRFSGSGSGTDYTLTISSLQPEDFATYYCVQYAQFPWTFGGGTKLEIKTTTPAPRPPTPAPTIASQPLSLRPEACRPAAGGAVHTRGLDFACDIYIWAPLAGTCGVLLLSLVITLYCKRGRKKLLYIFKQPFMRPVQTTQEEDGCSCRFPEEEEGGCELRVKFSRSADAPAYQQGQNQLYNELNLGRREEYDVLDKRRGRDPEMGGKPRRKNPQEGLYNELQKDKMAEAYSEIGMKGERRRGKGHDGLYQGLSTATKDTYDALHMQALPPR

SEQ ID NO: 507 - protein, 121 aa, synthetic construct
EVQLLESGGGLVQPGGSLRLSCAASGFTFSNYDMSWVRQAPGKGLEWVSGISHSSGSKYYADSVKGRFTISRDNSKNTLYLQMNSLRAEDTAVYYCAKDATPRPLKPFDYWGQGTLVTVSS

SEQ ID NO: 508 - protein, 121 aa, synthetic construct
EVQLLESGGGLVQPGGSLRLSCAASGFTFSNYDMSWVRQAPGKCLEWVSGISHSSGSKYYADSVKGRFTISRDNSKNTLYLQMNSLRAEDTAVYYCAKDATPRPLKPFDYWGQGTLVTVSS

SEQ ID NO: 509 - protein, 111 aa, synthetic construct
QSVLTQPPSASGTPGQRVTISCTGSSSNIGNNDVSWYQQLPGTAPKLLIYDDNKRPSGVPDRFSGSKSGTSASLAISGLRSEDEADYYCGSWDASLNAYVFGGGTKLTVLG

SEQ ID NO: 510 - protein, 111 aa, synthetic construct
QSVLTQPPSASGTPGQRVTISCTGSSSNIGNNDVSWYQQLPGTAPKLLIYDDNKRPSGVPDRFSGSKSGTSASLAISGLRSEDEADYYCGSWDASLNAYVFGCGTKLTVLG

SEQ ID NO: 511 - protein, 126 aa, synthetic construct
EVQLVQSGAEVKKPGSSVKVSCKASGGTFSSYAISWVRQAPGQGLEWMGGIIPIFGTANYAQKFQGRVTITADESTSTAYMELSSLRSEDTAVYYCAREEGPYCSSTSCYGAFDIWGQGTLVTVSS

SEQ ID NO: 512 - protein, 126 aa, synthetic construct
EAQLVQSGAEGKKPGSSVKVSCKAPGGTFNSYAISWVRQAPGQGLEWMGGIIPIFGTAYYAQKFQGRVTITADESTSTAYMELSSLRSEDTAVYYCAREEGPYCSSTSCYGAFDIWGRGTLVTVSS

SEQ ID NO: 513 - protein, 126 aa, synthetic construct
EVQLVQSGAEVKKPGSSVKVSCKASGGTFSSYAIGWVRQAPGQGLEWMGGIIPIFGIANYAQKFQGRVTITADESTSSAYMELSSLRSEDTAVYYCAREEGPYCSSTSCYGAFDIWGQGTLVTVSS

SEQ ID NO: 514 - protein, 126 aa, synthetic construct; identical to SEQ ID NO: 513

SEQ ID NO: 515 - protein, 126 aa, synthetic construct
EVQLVQSGAEVKKPGSSVKVSCKASGGTFSSYAISWVRQAPGQGLEWMGGIIPIFGTANYAQKFQGRVTITADESTSTAYMELSSLRSEDTAVYYCAREEGPYCSSTSCYAAFDIWGQGTLVTVSS

SEQ ID NO: 516 - protein, 126 aa, synthetic construct
EVQLVQSGAEVKKPGSSVKVSCKASGGTFSSYAISWVRQAPGQGLEWVGGIIPIFGTANYAQKFQGRVKITADESASTAYMELSSLRSEDTAVYYCAREEGPYCSSTSCYGAFDIWGQGTLVTVSS

SEQ ID NO: 517 - protein, 126 aa, synthetic construct
EVQLVQSGAEVKKLGSSVKVSCKASGGTFSSYAISWVRQAPGQGLEWVGGIIPIFGTANYAQKFQGRVKITADESASTAYMELSSLRSEDTAVYYCAREEGPYCSSTSCYGAFDIWGQGTLVTVSS

SEQ ID NO: 518 - protein, 126 aa, synthetic construct; identical to SEQ ID NO: 516

SEQ ID NO: 519 - protein, 126 aa, synthetic construct; identical to SEQ ID NO: 516

SEQ ID NO: 520 - protein, 126 aa, synthetic construct; identical to SEQ ID NO: 516

SEQ ID NO: 521 - protein, 126 aa, synthetic construct; identical to SEQ ID NO: 516

SEQ ID NO: 522 - protein, 251 aa, synthetic construct
DIVMTQTPLSSPVTLGQPASISCRSSQSLVHSDGNTYLSWLQQRPGQPPRLLIYKISNRFFGVPDRFSGSGAGTDFTLKISRVEAEDVGVYYCMQATQFPHTFGQGTKLEIKGGSEGKSSGSGSESKSTGGSQVTLKESGPVLVKPTETLTLTCTVSGFSLTNIRMSVSWIRQPPGKALEWLAHIFSNDEKSYSSSLKSRLTISRDTSKSQVVLTLTNVDPVDTATYYCARMRLPYGMDVWGQGTTVTVSS

SEQ ID NO: 523 - protein, 251 aa, synthetic construct
QVTLKESGPVLVKPTETLTLTCTVSGFSLTNIRMSVSWIRQPPGKALEWLAHIFSNDEKSYSSSLKSRLTISRDTSKSQVVLTLTNVDPVDTATYYCARMRLPYGMDVWGQGTTVTVSSGGSEGKSSGSGSESKSTGGSDIVMTQTPLSSPVTLGQPASISCRSSQSLVHSDGNTYLSWLQQRPGQPPRLLIYKISNRFFGVPDRFSGSGAGTDFTLKISRVEAEDVGVYYCMQATQFPHTFGQGTKLEIK

SEQ ID NO: 524 - protein, 252 aa, synthetic construct
QLQLQESGPGLVKPSETLSLTCTVSGGSLSSSSYWWGWTRQPPGRGLEWIGTMYYSGNIYYNPSLQSRATISVDTSKNQFSLKLSSVTAADTAVYYCARHVGYSYGRRFWYFDLWGRGTLVTVSSGGSEGKSSGSGSESKSTGGSEIVLTQSPATLSLSPGERATLSCRASQSVSSYLAWYQQKPGQAPRLLIYDASNRATGIPARFSGSGSGTDFTLTISSLEPEDFAVYYCQQRSNWPPTFGQGTKVEIK

SEQ ID NO: 525 - protein, 252 aa, synthetic construct
EIVLTQSPATLSLSPGERATLSCRASQSVSSYLAWYQQKPGQAPRLLIYDASNRATGIPARFSGSGSGTDFTLTISSLEPEDFAVYYCQQRSNWPPTFGQGTKVEIKGGSEGKSSGSGSESKSTGGSQLQLQESGPGLVKPSETLSLTCTVSGGSLSSSSYWWGWTRQPPGRGLEWIGTMYYSGNIYYNPSLQSRATISVDTSKNQFSLKLSSVTAADTAVYYCARHVGYSYGRRFWYFDLWGRGTLVTVSS

SEQ ID NO: 526 - protein, 246 aa, synthetic construct
EIVLTQSPATLSLSPGERATLSCRASQSVSSYLAWYQQKPGQAPRLLIYDASNRATGIPARFSGSGSGTDFTLTISSLEPEDFAVYYCQQRSNWPLTFGQGTKVEIKGTEGKSSGSGSESKSTEVQLVQSGAEVKKPGESLKISCKGSGYSFTSYFIGWVRQMPGKGLEWMGIIYPGKSDTRYSPSFQGQVTISADKSISTAYLQWSSLKASDTAMYYCARVYSFGGRHKALFDYWGQGTLVTVSS

SEQ ID NO: 527 - protein, 243 aa, synthetic construct
DIQMTQSPSSLSASVGDRVTITCRASQSISSYLNWYQQKPGKAPKLLIYAASSLQSGVPSRFSGSGSGTDFTLTISSLQPEDFATYYCQQSYSTPLTFGQGTKVEIKGTEGKSSGSGSESKSTQVQLVQSGAEVKKPGSSVKVSCKASGGTFSSYAISWVRQAPGQGLEWMGGIIPIFGTANYAQKFQGRVTITADESTSTAYMELSSLRSEDTAVYYCARESRWRGYKLDYWGQGTLVTVSS

SEQ ID NO: 528 - protein, 241 aa, synthetic construct
DIQMTQSPSSLSASVGDRVTITCKASQNVATHVGWYQQKPGKAPKRLIYSASYRYSGVPSRFSGSGSGTEFTLTISNLQPEDFATYYCQQYNRYPYTFGQGTKLEIKGTEGKSSGSGSESKSTQVQLVQSGAEVKKPGASVKVSCKASGYSFTGYTMNWVRQAPGQGLEWMGLINPYNSDTNYAQKLQGRVTMTTDTSTSTAYMELRSLRSDDTAVYYCARVALRVALDYWGQGTLVTVSS

SEQ ID NO: 529 - protein, 246 aa, synthetic construct
EVQLVQSGAEVKKPGESLKISCKGSGYSFTSYFIGWVRQMPGKGLEWMGIIYPGKSDTRYSPSFQGQVTISADKSISTAYLQWSSLKASDTAMYYCARVYSFGGRHKALFDYWGQGTLVTVSSGTEGKSSGSGSESKSTEIVLTQSPATLSLSPGERATLSCRASQSVSSYLAWYQQKPGQAPRLLIYDASNRATGIPARFSGSGSGTDFTLTISSLEPEDFAVYYCQQRSNWPLTFGQGTKVEIK

SEQ ID NO: 530 - protein, 243 aa, synthetic construct
QVQLVQSGAEVKKPGSSVKVSCKASGGTFSSYAISWVRQAPGQGLEWMGGIIPIFGTANYAQKFQGRVTITADESTSTAYMELSSLRSEDTAVYYCARESRWRGYKLDYWGQGTLVTVSSGTEGKSSGSGSESKSTDIQMTQSPSSLSASVGDRVTITCRASQSISSYLNWYQQKPGKAPKLLIYAASSLQSGVPSRFSGSGSGTDFTLTISSLQPEDFATYYCQQSYSTPLTFGQGTKVEIK

SEQ ID NO: 531 - protein, 241 aa, synthetic construct
QVQLVQSGAEVKKPGASVKVSCKASGYSFTGYTMNWVRQAPGQGLEWMGLINPYNSDTNYAQKLQGRVTMTTDTSTSTAYMELRSLRSDDTAVYYCARVALRVALDYWGQGTLVTVSSGTEGKSSGSGSESKSTDIQMTQSPSSLSASVGDRVTITCKASQNVATHVGWYQQKPGKAPKRLIYSASYRYSGVPSRFSGSGSGTEFTLTISNLQPEDFATYYCQQYNRYPYTFGQGTKLEIK

SEQ ID NO: 532 - protein, 707 aa, synthetic construct
KSSNEATNITPKHNMKAFLDELKAENIKKFLYNFTQIPHLAGTEQNFQLAKQIQSQWKEFGLDSVELAHYDVLLSYPNKTHPNYISIINEDGNEIFNTSLFEPPPPGYENVSDIVPPFSAFSPQGMPEGDLVYVNYARTEDFFKLERDMKINCSGKIVIARYGKVFRGNKVKNAQLAGAKGVILYSDPADYFAPGVKSYPDGWNLPGGGVQRGNILNLNGAGDPLTPGYPANEYAYRRGIAEAVGLPSIPVHPIGYYDAQKLLEKMGGSAPPDSSWRGSLKVPYNVGPGFTGNFSTQKVKMHIHSTNEVTRIYNVIGTLRGAVEPDRYVILGGHRDSWVFGGIDPQSGAAVVHEIVRSFGTLKKEGWRPRRTILFASWDAEEFGLLGSTEWAEENSRLLQERGVAYINADSSIEGNYTLRVDCTPLMYSLVHNLTKELKSPDEGFEGKSLYESWTKKSPSPEFSGMPRISKLGSGNDFEVFFQRLGIASGRARYTKNWETNKFSGYPLYHSVYETYELVEKFYDPMFKYHLTVAQVRGGMVFELANSIVLPFDCRDYAVVLRKYADKIYSISMKHPQEMKTYSVSFDSLFSAVKNFTEIASKFSERLQDFDKSNPIVLRMMNDQLMFLERAFIDPLGLPDRPFYRHVIYAPSSHNKYAGESFPGIYDALFDIESKVDPSKAWGEVKRQIYVAAFTVQAAAETLSEVA

SEQ ID NO: 533 - protein, 254 aa, synthetic construct
QSVLTQPPSVSGAPGQRVTISCTGSSSNIGAGYDVHWYQQLPGTAPKLLIYGNSNRPSGVPDRFSGSKSGTSASLAITGLQAEDEADYYCQSYDSSLSGYVFGTGTKVTVLGSRGGGGSGGGGSGGGGSLEMAEVQLVQSGAEVKKPGESLKISCKGSGYSFTSYWIGWVRQMPGKGLEWMGIIYPGDSDTRYSPSFQGQVTISADKSISTAYLQWSSLKASDTAMYYCARSMGSSLYASSDVWGQGTLVTVSS

SEQ ID NO: 534 - protein, 249 aa, synthetic construct
QAVLTQPPSASGTPGQRVTISCSGSSSNIGSNTVNWYQQLPGTAPKLLMYSNNQRPSGVPDRFSGSKSGTSASLAISGLQSEDEADYYCAAWDDSLNGYVFGTGTKVTVLGSRGGGGSGGGGSGGGGSLEMAEVQLVQSGAEMKKPGESLKISCKGSGYNFASYWVGWVRQMPGKGLEWMGTIYPDDSDTRYGPAFQGQVTISADKSISTAYLQWSSLKASDTAMYYCARDSYYGIDVWGQGTLVTVSS

SEQ ID NO: 535 - protein, 132 aa, synthetic construct
MSPAQFLFLLVLWIQETNGDVVMTQTPLTLSVTIGQPASISCKSSQSLLYSNGKTYLNWLLQRPGQSPKRLIYLVSKLDSGVPDRFTGSGSGTDFTLKISRVEAEDLGVYYCVQGTHFPHTFGGGTKLEIKR

SEQ ID NO: 536 - protein, 133 aa, synthetic construct
MNFGLSLIFLVLVLKGVQCEVKVVESGGGLVKPGASLKLSCAASGFTFSNYGMSWVRQTSDKRLEWVASISSGGDSTFYADNVKGRFTISRENAKNTLYLQMSSLKSEDTALYYCARDDLFNWGQGTTLTVSS

SEQ ID NO: 537 - protein, 5 aa, synthetic construct
SYYMH

SEQ ID NO: 538 - protein, 17 aa, synthetic construct
IINPSGGSTSYAQKFQG

SEQ ID NO: 539 - protein, 10 aa, synthetic construct
GVGAHDAFDI

SEQ ID NO: 540 - protein, 9 aa, synthetic construct
VVAAAVADY

SEQ ID NO: 541 - protein, 16 aa, synthetic construct
RSSQSLLHSNGNNYLD

SEQ ID NO: 542 - protein, 16 aa, synthetic construct
RSSQSLLHSNGYNYLD

SEQ ID NO: 543 - protein, 7 aa, synthetic construct
LGSNRAS

SEQ ID NO: 544 - protein, 9 aa, synthetic construct
MQGTHPAIS

SEQ ID NO: 545 - protein, 9 aa, synthetic construct
MQSLQTPFT

SEQ ID NO: 546 - protein, 112 aa, synthetic construct
DVVMTQSPLSLPVTPGEPASISCRSSQSLLHSNGNNYLDWYLQKPGQSPQLLIYLGSNRASGVPDRFSGSGSDTDFTLQISRVEAEDVGVYYCMQGTHPAISFGQGTRLEIK

SEQ ID NO: 547 - protein, 119 aa, synthetic construct
EVQLVQSGAEVKKPGASVKVSCKASGYTFTSYYMHWVRQAPGQGLEWMGIINPSGGSTSYAQKFQGRVTMTRDTSTSTVYMELSSLRSEDTAVYYCARGVGAHDAFDIWGQGTTVTVSS

SEQ ID NO: 548 - protein, 107 aa, synthetic construct
DIQMTQSPSSLSASVGDRVTITCRASQDISNYLNWYQQKPGKAPKLLIYYTSRLHSGVPSRFSGSGSGTDFTFTISSLQPEDIATYYCQQYSKLPRTFGGGTKVEIK

SEQ ID NO: 549 - protein, 111 aa, synthetic construct
DIVMTQSPDSLAVSLGERATINCRASKSVSTSGYSYMHWYQQKPGQPPKLLIYLASNLESGVPDRFSGSGSGTDFTLTISSLQAEDVAVYYCQHIRELPYTFGGGTKVEIK

SEQ ID NO: 550 - protein, 111 aa, synthetic construct
DIQMTQSPSSLSASVGDRVTITCRASKSVSTSGYSYMHWYQQKPGKAPKLLIYLASNLESGVPSRFSGSGSGTDFTFTISSLQPEDIATYYCQHIRELPYTFGGGTKVEIK

SEQ ID NO: 551 - protein, 107 aa, synthetic construct
DIQMTQSPSSVSASVGDRVTITCKASQDVSTSVAWYQQKPGKAPKLLIYSASYRYTGVPSRFSGSGSGTDFTLTISSLQPEDFATYYCQQHYNTPPTFGGGTKVEIK

SEQ ID NO: 552 - protein, 113 aa, synthetic construct
DIQMTQSPSSLSASVGDRVTITCKSSQSLLNSRNQKNYLAWYQQKPGKVPKLLIYFASTRESGVPSRFSGSGSGTDFTLTISSLQPEDVATYFCQQHYITPYTFGGGTKVEIK

SEQ ID NO: 553 - protein, 121 aa, synthetic construct
QVQLVQSGAEVKKPGASVKVSCKASGYTFTSYWMHWVRQAPGQRLEWMGNIYPGSGITHYNEKFKSRVTITRDTSASTAYMELSSLRSEDTAVYYCTRGGYGKGDWYFDVWGQGTTVTVSS

SEQ ID NO: 554 - protein, 117 aa, synthetic construct
EVQLVQSGAEVKKPGESLKISCKGSGYSFTSYPMHWVRQMPGKGLEWMGWIKMYSGVPTYADDFKGQVTISLDKSISTAYLQWSSLKASDTAMYYCARNWDKGFDYWGQGTTVTVSS

SEQ ID NO: 555 - protein, 122 aa, synthetic construct
QVQLVQSGAEVKKPGASVKVSCKASGYTFTSYGLAWVRQAPGQGLEWMGYIFPGNDYTAYNEKFQGRVTMTTDTSTSTAYMELRSLRSDDTAVYYCAREGQLGLHYYFMDYWGQGTLVTVSS

SEQ ID NO: 556 - protein, 119 aa, synthetic construct
QVQLVQSGAEVKKPGASVKVSCKASGYTFTDYYMNWVRQAPGQGLEWMGDINPYYGSSNYNQKFKGRVTMTTDKSTSTAYMELRSLRSDDTAVYYCARDSSGYVGFAYWGQGTLVTVSS

SEQ ID NO: 557 - protein, 113 aa, synthetic construct; identical to SEQ ID NO: 552

SEQ ID NO: 558 - protein, 111 aa, synthetic construct
QSALTQPASVSGSPGQSITISCTGTSSDVGGYNYVSWYQQHPGKAPKVMIYDVTNRPSGVSNRFSGSKSGNTASLTISGLQAEDEADYYCSSYTIASTLVVFGGGTKLTVL

SEQ ID NO: 559 - protein, 112 aa, synthetic construct
QSALTQPASVSGSPGQSITISCTGTSSDVGGYNYVSWYQQHPGKAPKVMIYDVTNRPSGVSNRFSGSKSGNTASLTISGLQAEDEADYYCSSYTSTSTFVVFGGGTKLTVLG

SEQ ID NO: 560 - protein, 111 aa, synthetic construct
QSALTQPASVSGSPGQSITISCTGTSSDVGGYNYVSWYQQHPGKAPKVMIYDVTNRPSGVSNRFSGSKSGNTASLTISGLQAEDEADYYCSSYTRTSTLVVFGGGTKLTVL

SEQ ID NO: 561 - protein, 120 aa, synthetic construct
QVQLQQSGGGLVKPGGSLRLSCAASGFTFSSYDMHWVRQAPGKGLEWVAVISYDGSNKYYADSVKGRFTISRDNSKNTLYLQMDSLRAEDTAVYFCAKEGDSSRWSYDLWGRGTLVTVSS

SEQ ID NO: 562 - protein, 120 aa, synthetic construct
QVQLQQSGGGLVKPGGSLRLSCAASGFTFSSYAMHWVRQAPGKGLEWVAVISYDGSNKYYADSVKGRFTISRDNSKNTLYLQMDSLRAEDTAVYYCAKEGDSSRWSYDLWGRGTLVTVSS

SEQ ID NO: 563 - protein, 120 aa, synthetic construct; identical to SEQ ID NO: 561

SEQ ID NO: 564 - protein, 108 aa, synthetic construct
DTVMTQSPASLSTSVGERVTVNCKASQHVHAAVAWFQQKPGQSPRRLIYLATSRHTGVPDRFTGSGFGRDFTLTISNVEAEDLAVYYCLQYGSIPFAFGSGTKLELIR

SEQ ID NO: 565 - protein, 108 aa, synthetic construct
DTVMTQSPASMSTSVGERVTVNCKASQHVTAVVAWFQQKPGQSPKRLIYLSTYRHTGVPNRFTGSGFGRDFTLTISNVEAEDLAVYYCLQYGSIPFTFGSGTRLEIKR

SEQ ID NO: 566 - protein, 119 aa, synthetic construct
EVQLVESGGGLVQPGRSLRVSCAASGFTFSIYGMAWVRQAPTKGLEWVASIINSGGSTYYRDSVRGRFTISRDNAKSTLYLQMDSLRSEDTATYYCTTVDGSHYFDYWGRGVMVTVSSA

SEQ ID NO: 567 - protein, 118 aa, synthetic construct
EVQLTESGGGLVPPGRSLKLSCEASGFIFSDYGMAWVRQGPTKGLEWVASITNSGGNTFYRDSVKGRFTISRDNAKRTLYLQMDSLRSEDTATYYCTTVDGSHYFDYWGQGVMVTVSS

SEQ ID NO: 568 - protein, 130 aa, synthetic construct
MHFQVQIFSFLLISASVIMSRGDIQLTQSPSSLSASVGDRVTITCTASSTVSSTYLHWYQQKPGKAPKLLIYSTSNLASGVPSRFSGSGSGTDYTLTISSLQPEDFATYYCHQYHRSPPTFGQGTKLEIK

SEQ ID NO: 569 - protein, 123 aa, synthetic construct
EVQLVQSGAEVKKPGASVKISCKASGYTFTDYYMNWVRQAPGQGLEWMGDVVPNNGVPTYNQKFKGRVTITADKSTSTAYMELRSLRSEDTAVYYCARPHYYYAGRSGAMDYWGQGTLVTVSS

SEQ ID NO: 570 - protein, 106 aa, synthetic construct
IVLTQSPAIMSASPGEKVTITCSASSSVSYLHWFQQKPGTSPKLWVYSTSNLPSGVPARFGGSGSGTSYSLTISRMEAEDAATYYCQQRSIYPPWTFGGGTKLEIK

SEQ ID NO: 571 - protein, 106 aa, synthetic construct
IVLTQSPSIMSVSPGEKVTITCSASSSVSYMHWFQQKPGTSPKLCIYSTSNLASGVPARFSGRGSGTSYSLTISRVAAEDAATYYCQQRSNYPPWTFGGGTKLEIK

SEQ ID NO: 572 - protein, 106 aa, synthetic construct
IVLTQSPAIMSASPGEKVTITCSASSSVSYMHWFQQKPGTSPKLWIYSTSNLASGVPARFSGSGSGTSYSLTISRVAAEDAATYYCQQRSTYPPWTFGGGTKLEIK

SEQ ID NO: 573 - protein, 106 aa, synthetic construct
IVLTQSPAIMSASPGEKVTITCSASSSVNYMHWFQLKPGTSPKLLIYSTSNLASGVPARFSGRGSGTSYSLTISRMEAEDAATYYCQQRNNYPPWTFGGGTKLEIK

SEQ ID NO: 574 - protein, 106 aa, synthetic construct
IVLTQSPSIMSVSPGEKVTITCSASSSVSYMHWFQQKPGTSPKLGIYSTSNLASGVPARFSGRGSGTSYSLTISRVAAEDAATYYCQQRSNYPPWTFGGGTKLEIK

SEQ ID NO: 575 - protein, 106 aa, synthetic construct
IVLTQSPSIMSVSPGEKVTITCSASSSVSYMHWFQQKPGTSPKLSIYSTSNLASGVPARFSGRGSGTSYSLTISRVAAEDAATYYCQQRSNYPPWTFGGGTKLEIK

SEQ ID NO: 576 - protein, 107 aa, synthetic construct
DIVLTQSPSIMSVSPGEKVTITCSASSSVSYMHWFQQKPGTSPKLLIYSTSNLASGVPARFSGRGSGTSYSLTISRVAAEDAATYYCQQRSNYPPWTFGGGTKLEIK

SEQ ID NO: 577 - protein, 106 aa, synthetic construct
IVLTQSPSIMSVSPGEKVTITCSASSSVSYMHWFQQKPGTSPKLLIYSTSNLASGVPARFSGRGSGTSYSLTISRVAAEDAATYYCQQRSNYPPWTFGGGTKLEIK

SEQ ID NO: 578 - protein, 106 aa, synthetic construct
IVLTQSPSIMSVSPGEKVTITCSASSSVSYMHWFQQKPGTSPKLWIYSTSNLASGVPARFSGRGSGTSYSLTISRVAAEDAATYYCQQRSNYPPWTFGGGTKLEIK

SEQ ID NO: 579 - protein, 106 aa, synthetic construct; identical to SEQ ID NO: 575

SEQ ID NO: 580 - protein, 117 aa, synthetic construct
EVQLQQSGPELVKPGASMKISCKASGYSFTGYTMNWVKQSHGKNLEWIGLINPYNGGTSYNQKFKGKATLTIDKSSSTAYMELLSLTSEDSAVYYCARDYGYVLDYWGQGTTLTVSS

SEQ ID NO: 581 - protein, 117 aa, synthetic construct; identical to SEQ ID NO: 88

SEQ ID NO: 582 - protein, 117 aa, synthetic construct
EVQLQQSGPELVKPGASMKISCKASGYSFTGYTMNWVKQSHGKNLEWIGLINPYNGGIIYNQKFKGKATLTVDKSSSTAYMELLSLTSEDSAVFYCARDFGYVLDYWGQGTTLTVSS

SEQ ID NO: 583 - protein, 117 aa, synthetic construct
EVQLQQSRPELVKPGASMKISCKASGYSFTGYTLNWVKQSHGKNLEWIGLINPYNGGSSYNQKFKDKATLTVDKSSSTAYMELLSLTSEDSAVYYCARDYGYVFDYWGQGTTLTVSS

SEQ ID NO: 584 - protein, 21 aa, synthetic construct
MALPVTALLLPLALLLHAARP

SEQ ID NO: 585 - DNA, 63 bp, synthetic construct
  source 1..63: mol_type = other DNA
atggcactccccgtaactgctctgctgctgccgttggcattgctcctgcacgccgcacgcccg

SEQ ID NO: 586 - protein, 374 aa, synthetic construct; identical to SEQ ID NO: 174

SEQ ID NO: 587 - protein, 481 aa, synthetic construct
MALPVTALLLPLALLLHAARPDIQMTQSPSSLSASVGDRVTITCRASQDISKYLNWYQQKPGGTVKLLIYHTSRLHSGVPSRFSGSGSGTDFTLTISSLQPEDIATYYCQQGNTLPYTFGGGTKLEITGGGGSGGGGSGGGGSQVQLQESGPGLVKPSQTLSLTCTVSGVSLPDYGVSWIRQPPGKGLEWIGVIWGSETTYYNSALKSRLTISKDNSKNQVSLKLSSVTAADTAVYYCAKHYYYGGSYAMDYWGQGTSVTVSSTTTPAPRPPTPAPTIASQPLSLRPEACRPAAGGAVHTRGLDFACDIYIWAPLAGTCGVLLLSLVITLYCRRDQRLPPDAHKPPGGGSFRTPIQEEQADAHSTLAKIRVKFSRSADAPAYQQGQNQLYNELNLGRREEYDVLDKRRGRDPEMGGKPRRKNPQEGLYNELQKDKMAEAYSEIGMKGERRRGKGHDGLYQGLSTATKDTYDALHMQALPPR

SEQ ID NO: 588 - protein, 481 aa, synthetic construct
MALPVTALLLPLALLLHAARPDIQMTQSPSSLSASVGDRVTITCRASQDISKYLNWYQQKPGGTVKLLIYHTSRLHSGVPSRFSGSGSGTDFTLTISSLQPEDIATYFCQQGNTLPYTFGGGTKLEITGGGGSGGGGSGGGGSQVQLQESGPGLVKPSQTLSLTCTVSGVSLPDYGVSWIRQPPGKGLEWIGVIWGSETTYYNSALKSRLTISKDNSKNQVSLKLSSVTAADTAVYYCAKHYYYGGSYAMDYWGQGTSVTVSSTTTPAPRPPTPAPTIASQPLSLRPEACRPAAGGAVHTRGLDFACDIYIWAPLAGTCGVLLLSLVITLYCRRDQRLPPDAHKPPGGGSFRTPIQEEQADAHSTLAKIRVKFSRSADAPAYQQGQNQLYNELNLGRREEYDVLDKRRGRDPEMGGKPRRKNPQEGLYNELQKDKMAEAYSEIGMKGERRRGKGHDGLYQGLSTATKDTYDALHMQALPPR

SEQ ID NO: 589 - protein, 481 aa, synthetic construct
MALPVTALLLPLALLLHAARPDIQMTQSPSSLSASVGDRVTITCRASQDISKYLNWYQQKPDGTVKLLIYHTSRLHSGVPSRFSGSGSGTDYTLTISSLQPEDIATYFCQQGNTLPYTFGGGTKLEITGGGGSGGGGSGGGGSQVQLQESGPGLVKPSQTLSLTCTVSGVSLPDYGVSWIRQPPGKGLEWIGVIWGSETTYYNSALKSRLTISKDNSKNQVSLKLSSVTAADTAVYYCAKHYYYGGSYAMDYWGQGTSVTVSSTTTPAPRPPTPAPTIASQPLSLRPEACRPAAGGAVHTRGLDFACDIYIWAPLAGTCGVLLLSLVITLYCRRDQRLPPDAHKPPGGGSFRTPIQEEQADAHSTLAKIRVKFSRSADAPAYQQGQNQLYNELNLGRREEYDVLDKRRGRDPEMGGKPRRKNPQEGLYNELQKDKMAEAYSEIGMKGERRRGKGHDGLYQGLSTATKDTYDALHMQALPPR

SEQ ID NO: 590 - protein, 481 aa, synthetic construct
MALPVTALLLPLALLLHAARPDIQMTQSPSSLSASVGDRVTITCRASQDISKYLNWYQQKPGGTVKLLIYHTSRLHSGVPSRFSGSGSGTDFTLTISSLQPEDIATYYCQQGNTLPYTFGGGTKLEITGGGGSGGGGSGGGGSQVQLQESGPGLVKPSQTLSLTCTVSGVSLPDYGVSWIRQPPGKGLEWLGVIWGSETTYYNSALKSRLTISKDNSKSQVSLKLSSVTAADTAVYYCAKHYYYGGSYAMDYWGQGTSVTVSSTTTPAPRPPTPAPTIASQPLSLRPEACRPAAGGAVHTRGLDFACDIYIWAPLAGTCGVLLLSLVITLYCRRDQRLPPDAHKPPGGGSFRTPIQEEQADAHSTLAKIRVKFSRSADAPAYQQGQNQLYNELNLGRREEYDVLDKRRGRDPEMGGKPRRKNPQEGLYNELQKDKMAEAYSEIGMKGERRRGKGHDGLYQGLSTATKDTYDALHMQALPPR

SEQ ID NO: 591 - protein, 482 aa, synthetic construct
MALPVTALLLPLALLLHAARPDIQMTQSPSSLSASVGDRVTITCRASQDISKYLNWYQQKPGGTVKLLIYHTSRLHSGVPSRFSGSGSGTDFTLTISSLQPEDIATYFCQQGNTLPYTFGGGTKLEITGGGGSGGGGSGGGGSQVQLQESGPGLVKPSQTLSLTCTVSGVSLPDYGVSWIRQPPGKGLEWLGVIWGSETTYYNSALKSRLTISKDNSKSQVSLKLSSVTAADTAVYYCAKHYYYGGSYAMDYWGQGTSVTVSSTTTPAPRPPTPAPTIASQPLSLRPEACRPAAGGAVHTRGLDFACDIYIWAPLAGTCGVLLLSLVITLYCRRDQRLPPDAHKPPGGGSFRTPIQEEQADAHSTLAKIRVKFSRSSADAPAYQQGQNQLYNELNLGRREEYDVLDKRRGRDPEMGGKPRRKNPQEGLYNELQKDKMAEAYSEIGMKGERRRGKGHDGLYQGLSTATKDTYDALHMQALPPR

SEQ ID NO: 592 - protein, 481 aa, synthetic construct
MALPVTALLLPLALLLHAARPDIQMTQSPSSLSASVGDRVTITCRASQDISKYLNWYQQKPDGTVKLLIYHTSRLHSGVPSRFSGSGSGTDYTLTISSLQPEDIATYFCQQGNTLPYTFGGGTKLEITGGGGSGGGGSGGGGSQVQLQESGPGLVKPSQTLSLTCTVSGVSLPDYGVSWIRQPPGKGLEWLGVIWGSETTYYNSALKSRLTISKDNSKSQVSLKLSSVTAADTAVYYCAKHYYYGGSYAMDYWGQGTSVTVSSTTTPAPRPPTPAPTIASQPLSLRPEACRPAAGGAVHTRGLDFACDIYIWAPLAGTCGVLLLSLVITLYCRRDQRLPPDAHKPPGGGSFRTPIQEEQADAHSTLAKIRVKFSRSADAPAYQQGQNQLYNELNLGRREEYDVLDKRRGRDPEMGGKPRRKNPQEGLYNELQKDKMAEAYSEIGMKGERRRGKGHDGLYQGLSTATKDTYDALHMQALPPR

SEQ ID NO: 593 - protein, 481 aa, synthetic construct
MALPVTALLLPLALLLHAARPDIQMTQSPSSLSASVGDRVTITCRASQDISKYLNWYQQKPGGTVKLLIYHTSRLHSGVPSRFSGSGSGTDFTLTISSLQPEDIATYYCQQGNTLPYTFGGGTKLEITGGGGSGGGGSGGGGSQVQLQESGPGLVKPSQTLSVTCTVSGVSLPDYGVSWIRQPPGKGLEWLGVIWGSETTYYNSALKSRLTISKDNSKSQVSLKLSSVTAADTAVYYCAKHYYYGGSYAMDYWGQGTSVTVSSTTTPAPRPPTPAPTIASQPLSLRPEACRPAAGGAVHTRGLDFACDIYIWAPLAGTCGVLLLSLVITLYCRRDQRLPPDAHKPPGGGSFRTPIQEEQADAHSTLAKIRVKFSRSADAPAYQQGQNQLYNELNLGRREEYDVLDKRRGRDPEMGGKPRRKNPQEGLYNELQKDKMAEAYSEIGMKGERRRGKGHDGLYQGLSTATKDTYDALHMQALPPR

SEQ ID NO: 594 - protein, 481 aa, synthetic construct
MALPVTALLLPLALLLHAARPDIQMTQSPSSLSASVGDRVTITCRASQDISKYLNWYQQKPGGTVKLLIYHTSRLHSGVPSRFSGSGSGTDFTLTISSLQPEDIATYFCQQGNTLPYTFGGGTKLEITGGGGSGGGGSGGGGSQVQLQESGPGLVKPSQTLSVTCTVSGVSLPDYGVSWIRQPPGKGLEWLGVIWGSETTYYNSALKSRLTISKDNSKSQVSLKLSSVTAADTAVYYCAKHYYYGGSYAMDYWGQGTSVTVSSTTTPAPRPPTPAPTIASQPLSLRPEACRPAAGGAVHTRGLDFACDIYIWAPLAGTCGVLLLSLVITLYCRRDQRLPPDAHKPPGGGSFRTPIQEEQADAHSTLAKIRVKFSRSADAPAYQQGQNQLYNELNLGRREEYDVLDKRRGRDPEMGGKPRRKNPQEGLYNELQKDKMAEAYSEIGMKGERRRGKGHDGLYQGLSTATKDTYDALHMQALPPR

SEQ ID NO: 595 - protein, 481 aa, synthetic construct
MALPVTALLLPLALLLHAARPDIQMTQSPSSLSASVGDRVTITCRASQDISKYLNWYQQKPDGTVKLLIYHTSRLHSGVPSRFSGSGSGTDYTLTISSLQPEDIATYFCQQGNTLPYTFGGGTKLEITGGGGSGGGGSGGGGSQVQLQESGPGLVKPSQTLSVTCTVSGVSLPDYGVSWIRQPPGKGLEWLGVIWGSETTYYNSALKSRLTISKDNSKSQVSLKLSSVTAADTAVYYCAKHYYYGGSYAMDYWGQGTSVTVSSTTTPAPRPPTPAPTIASQPLSLRPEACRPAAGGAVHTRGLDFACDIYIWAPLAGTCGVLLLSLVITLYCRRDQRLPPDAHKPPGGGSFRTPIQEEQADAHSTLAKIRVKFSRSADAPAYQQGQNQLYNELNLGRREEYDVLDKRRGRDPEMGGKPRRKNPQEGLYNELQKDKMAEAYSEIGMKGERRRGKGHDGLYQGLSTATKDTYDALHMQALPPR

SEQ ID NO: 596 - protein, 481 aa, synthetic construct
MALPVTALLLPLALLLHAARPDIQMTQSPSSLSASVGDRVTITCRASQDISKYLNWYQQKPGGTVKLLIYHTSRLHSGVPSRFSGSGSGTDFTLTISSLQPEDIATYYCQQGNTLPYTFGGGTKLEITGGGGSGGGGSGGGGSQVQLQESGPGLVKPSQTLSVTCTVSGVSLPDYGVSWIRQPPRKGLEWLGVIWGSETTYYNSALKSRLTISKDNSKSQVSLKMSSVTAADTAIYYCAKHYYYGGSYAMDYWGQGTSVTVSSTTTPAPRPPTPAPTIASQPLSLRPEACRPAAGGAVHTRGLDFACDIYIWAPLAGTCGVLLLSLVITLYCRRDQRLPPDAHKPPGGGSFRTPIQEEQADAHSTLAKIRVKFSRSADAPAYQQGQNQLYNELNLGRREEYDVLDKRRGRDPEMGGKPRRKNPQEGLYNELQKDKMAEAYSEIGMKGERRRGKGHDGLYQGLSTATKDTYDALHMQALPPR

SEQ ID NO: 597 - protein, 481 aa, synthetic construct
MALPVTALLLPLALLLHAARPDIQMTQSPSSLSASVGDRVTITCRASQDISKYLNWYQQKPGGTVKLLIYHTSRLHSGVPSRFSGSGSGTDFTLTISSLQPEDIATYFCQQGNTLPYTFGGGTKLEITGGGGSGGGGSGGGGSQVQLQESGPGLVKPSQTLSVTCTVSGVSLPDYGVSWIRQPPRKGLEWLGVIWGSETTYYNSALKSRLTISKDNSKSQVSLKMSSVTAADTAIYYCAKHYYYGGSYAMDYWGQGTSVTVSSTTTPAPRPPTPAPTIASQPLSLRPEACRPAAGGAVHTRGLDFACDIYIWAPLAGTCGVLLLSLVITLYCRRDQRLPPDAHKPPGGGSFRTPIQEEQADAHSTLAKIRVKFSRSADAPAYQQGQNQLYNELNLGRREEYDVLDKRRGRDPEMGGKPRRKNPQEGLYNELQKDKMAEAYSEIGMKGERRRGKGHDGLYQGLSTATKDTYDALHMQALPPR

SEQ ID NO: 598 - protein, 481 aa, synthetic construct
MALPVTALLLPLALLLHAARPDIQMTQSPSSLSASVGDRVTITCRASQDISKYLNWYQQKPDGTVKLLIYHTSRLHSGVPSRFSGSGSGTDYTLTISSLQPEDIATYFCQQGNTLPYTFGGGTKLEITGGGGSGGGGSGGGGSQVQLQESGPGLVKPSQTLSVTCTVSGVSLPDYGVSWIRQPPRKGLEWLGVIWGSETTYYNSALKSRLTISKDNSKSQVSLKMSSVTAADTAIYYCAKHYYYGGSYAMDYWGQGTSVTVSSTTTPAPRPPTPAPTIASQPLSLRPEACRPAAGGAVHTRGLDFACDIYIWAPLAGTCGVLLLSLVITLYCRRDQRLPPDAHKPPGGGSFRTPIQEEQADAHSTLAKIRVKFSRSADAPAYQQGQNQLYNELNLGRREEYDVLDKRRGRDPEMGGKPRRKNPQEGLYNELQKDKMAEAYSEIGMKGERRRGKGHDGLYQGLSTATKDTYDALHMQALPPR

SEQ ID NO: 599 - protein, 479 aa, synthetic construct
MALPVTALLLPLALLLHAARPQVQLVQSGAEVKKPGASVKVSCKASGYTFTGHYLHWVRQAPGQGLEWMGWINPNSGGTNYAQKFQGRVTMTRDTSTSTVYMELSSLRSEDTAVYYCVRGSGWYDLDYWGQGTLVTVSSGGGGSGGGGSGGGGSDIQMTQSPSSLSASVGDRVTITCRASQNIGTYLAWYQQKPGKAPKLLIYDASNLETGVPSRFSGSGSGTDFTLTISSLQPEDFATYYCQQSYRIPLTFGQGTRLEIKTTTPAPRPPTPAPTIASQPLSLRPEACRPAAGGAVHTRGLDFACDIYIWAPLAGTCGVLLLSLVITLYCRRDQRLPPDAHKPPGGGSFRTPIQEEQADAHSTLAKIRVKFSRSADAPAYQQGQNQLYNELNLGRREEYDVLDKRRGRDPEMGGKPRRKNPQEGLYNELQKDKMAEAYSEIGMKGERRRGKGHDGLYQGLSTATKDTYDALHMQALPPR

SEQ ID NO: 600 - protein, 480 aa, synthetic construct
MALPVTALLLPLALLLHAARPQVQLVQSGAEVKKPGASVKVSCKASGYTFTNYYMHWVRQAPGQGLEWMGIINPSGGSTSYAQKFQGRVTMTRDTSTSTVYMELSSLRSEDTAVYYCARELGVAGYFDLWGRGTLVTVSSGGGGSGGGGSGGGGSDIQMTQSPSSLSASVGDRVTITCRASQRISNWLAWYQQKPGKAPKLLIYDASNLETGVPSRFSGSGSGTDFTLTISSLQPEDFATYYCQQTYSPPPTFGQGTKLEIKTTTPAPRPPTPAPTIASQPLSLRPEACRPAAGGAVHTRGLDFACDIYIWAPLAGTCGVLLLSLVITLYCRRDQRLPPDAHKPPGGGSFRTPIQEEQADAHSTLAKIRVKFSRSADAPAYQQGQNQLYNELNLGRREEYDVLDKRRGRDPEMGGKPRRKNPQEGLYNELQKDKMAEAYSEIGMKGERRRGKGHDGLYQGLSTATKDTYDALHMQALPPR

SEQ ID NO: 601 - protein, 489 aa, synthetic construct
MALPVTALLLPLALLLHAARPQVQLVQSGAEVKKPGASVKVSCKASGYTFTGYYIHWVRQAPGQGLEWMGIINPSGGSTSYAQKFQGRVTMTRDTSTSTVYMELSSLRSEDTAVYYCARDLSGIDGYIGFFDYWGQGTLVTVSSGGGGSGGGGSGGGGSDIVMTQSPLSLPVTPGEPASISCRSSQSLLHSNGYNYLDWYLQKPGQSPQLLIYAASSLQSGVPDRFSGSGSGTDFTLKISRVEAEDVGVYYCMQALQTPITFGQGTRLEIKTTTPAPRPPTPAPTIASQPLSLRPEACRPAAGGAVHTRGLDFACDIYIWAPLAGTCGVLLLSLVITLYCRRDQRLPPDAHKPPGGGSFRTPIQEEQADAHSTLAKIRVKFSRSADAPAYQQGQNQLYNELNLGRREEYDVLDKRRGRDPEMGGKPRRKNPQEGLYNELQKDKMAEAYSEIGMKGERRRGKGHDGLYQGLSTATKDTYDALHMQALPPR

SEQ ID NO: 602 - protein, 480 aa, synthetic construct
MALPVTALLLPLALLLHAARPQVQLVQSGAEVKKPGASVKVSCKASGGTFRSHVISWVRQAPGQGLEWMGIIDPSGGSTSYAQRFQGRVTMTRDTSTSTVYMELSSLRSEDTAVYYCAKDYTGLLGMDVWGQGTTVTVSSGGGGSGGGGSGGGGSDIQMTQSPSSLSASVGDRVTITCRASQDIDTYLAWYQQKPGKAPKLLIYAASSLQSGVPSRFSGSGSGTDFTLTISSLQPEDFATYYCQQSYTTPFTFGQGTKVEIKTTTPAPRPPTPAPTIASQPLSLRPEACRPAAGGAVHTRGLDFACDIYIWAPLAGTCGVLLLSLVITLYCRRDQRLPPDAHKPPGGGSFRTPIQEEQADAHSTLAKIRVKFSRSADAPAYQQGQNQLYNELNLGRREEYDVLDKRRGRDPEMGGKPRRKNPQEGLYNELQKDKMAEAYSEIGMKGERRRGKGHDGLYQGLSTATKDTYDALHMQALPPR

SEQ ID NO: 603 - protein, 480 aa, synthetic construct
MALPVTALLLPLALLLHAARPQVQLVQSGAEVKKPGASVKVSCKASGYTFIDYYIHWVRQAPGQGLEWMGWMNPNSGNTGYAQKFQGRVTMTRDTSTSTVYMELSSLRSEDTAVYYCARGLSGYDLDDYWGQGTLVTVSSGGGGSGGGGSGGGGSDIQMTQSPSSLSASVGDRVTITCQASQDISNYLNWYQQKPGKAPKLLIYDASSLESGVPSRFSGSGSGTDFTLTISSLQPEDFATYYCQQSYRSPLTFGGGTKVEIKTTTPAPRPPTPAPTIASQPLSLRPEACRPAAGGAVHTRGLDFACDIYIWAPLAGTCGVLLLSLVITLYCRRDQRLPPDAHKPPGGGSFRTPIQEEQADAHSTLAKIRVKFSRSADAPAYQQGQNQLYNELNLGRREEYDVLDKRRGRDPEMGGKPRRKNPQEGLYNELQKDKMAEAYSEIGMKGERRRGKGHDGLYQGLSTATKDTYDALHMQALPPR

SEQ ID NO: 604 - protein, 479 aa, synthetic construct
MALPVTALLLPLALLLHAARPQVQLVQSGAEVKKPGASVKVSCKASGYTFTSYYMHWVRQAPGQGLEWMGWINPNSGGTKYAHKFQGRVTMTRDTSTSTVYMELSSLRSEDTAVYYCARGLSGYDFDYWGQGTTVTVSSGGGGSGGGGSGGGGSDIQMTQSPSSLSASVGDRVTITCQASQDISNYLNWYQQKPGKAPKLLIYDASNLETGVPSRFSGSGSGTDFTLTISSLQPEDFATYYCQQAYRWPITFGQGTRLEIKTTTPAPRPPTPAPTIASQPLSLRPEACRPAAGGAVHTRGLDFACDIYIWAPLAGTCGVLLLSLVITLYCRRDQRLPPDAHKPPGGGSFRTPIQEEQADAHSTLAKIRVKFSRSADAPAYQQGQNQLYNELNLGRREEYDVLDKRRGRDPEMGGKPRRKNPQEGLYNELQKDKMAEAYSEIGMKGERRRGKGHDGLYQGLSTATKDTYDALHMQALPPR

SEQ ID NO: 605 - protein, 480 aa, synthetic construct
MALPVTALLLPLALLLHAARPQVQLVQSGAEVKKPGASVKVSCKASGYTFTGYYMHWVRQAPGQGLEWMGWMNPNSGNTGYAQKFQGRVTMTRDTSTSTVYMELSSLRSEDTAVYYCARGTDVYGDFDYWGQGTLVTVSSGGGGSGGGGSGGGGSDIQMTQSPSSLSASVGDRVTITCRASQSISSYLNWYQQKPGKAPKLLIYDASYLETGVPSRFSGSGSGTDFTLTISSLQPEDFATYYCQQSYTIPPTFGQGTKVEIKTTTPAPRPPTPAPTIASQPLSLRPEACRPAAGGAVHTRGLDFACDIYIWAPLAGTCGVLLLSLVITLYCRRDQRLPPDAHKPPGGGSFRTPIQEEQADAHSTLAKIRVKFSRSADAPAYQQGQNQLYNELNLGRREEYDVLDKRRGRDPEMGGKPRRKNPQEGLYNELQKDKMAEAYSEIGMKGERRRGKGHDGLYQGLSTATKDTYDALHMQALPPR

SEQ ID NO: 606 - protein, 487 aa, synthetic construct
MALPVTALLLPLALLLHAARPQVQLVQSGAEVKKPGSSVKVSCKASGYTFTENEMHWVRQAPGQGLEWMGGIIPIFGTANYAQKFQGRVTITADESTSTAYMELSSLRSEDTAVYYCAREGGTAMATGYYYYGMDVWGQGTTVTVSSGGGGSGGGGSGGGGSDIQMTQSPSSLSASVGDRVTITCQASQDISNYLNWYQQKPGKAPKLLIYDASNLETGVPSRFSGSGSGTDFTLTISSLQPEDFATYYCQQSYSTPLTFGQGTKVEIKTTTPAPRPPTPAPTIASQPLSLRPEACRPAAGGAVHTRGLDFACDIYIWAPLAGTCGVLLLSLVITLYCRRDQRLPPDAHKPPGGGSFRTPIQEEQADAHSTLAKIRVKFSRSADAPAYQQGQNQLYNELNLGRREEYDVLDKRRGRDPEMGGKPRRKNPQEGLYNELQKDKMAEAYSEIGMKGERRRGKGHDGLYQGLSTATKDTYDALHMQALPPR

SEQ ID NO: 607 - protein, 485 aa, synthetic construct
MALPVTALLLPLALLLHAARPQVQLVQSGAEVKKPGASVKVSCKASGYTFTENEMHWVRQAPGQGLEWMGWINSNGGYTGYALKFQGRVTMTRDTSTSTVYMELSSLRSEDTAVYYCARASNYGGHFDYWGQGTLVTVSSGGGGSGGGGSGGGGSDIVMTQSPLSLPVTPGEPASISCRSSQSLLHSNGYNYLDWYLQKPGQSPQLLIYQASSLESGVPDRFSGSGSGTDFTLKISRVEAEDVGVYYCMQGTHWPPTFGGGTKVEIKTTTPAPRPPTPAPTIASQPLSLRPEACRPAAGGAVHTRGLDFACDIYIWAPLAGTCGVLLLSLVITLYCRRDQRLPPDAHKPPGGGSFRTPIQEEQADAHSTLAKIRVKFSRSADAPAYQQGQNQLYNELNLGRREEYDVLDKRRGRDPEMGGKPRRKNPQEGLYNELQKDKMAEAYSEIGMKGERRRGKGHDGLYQGLSTATKDTYDALHMQALPPR

SEQ ID NO: 608 - protein, 480 aa, synthetic construct
MALPVTALLLPLALLLHAARPQVQLVQSGAEVKKPGASVKVSCKASGYTFTSYYMHWVRQAPGQGLEWMGIINPSGGSTIYAQKFQGRVTMTRDTSTSTVYMELSSLRSEDTAVYYCAKDMGAWAAGFDYWGQGTLVTVSSGGGGSGGGGSGGGGSDIQMTQSPSSLSASVGDRVTITCQASQDISNYLNWYQQKPGKAPKLLIYATSTLANGVPSRFSGSGSGTDFTLTISSLQPEDFATYYCQQSYSTLTFGQGTRLEIKTTTPAPRPPTPAPTIASQPLSLRPEACRPAAGGAVHTRGLDFACDIYIWAPLAGTCGVLLLSLVITLYCRRDQRLPPDAHKPPGGGSFRTPIQEEQADAHSTLAKIRVKFSRSADAPAYQQGQNQLYNELNLGRREEYDVLDKRRGRDPEMGGKPRRKNPQEGLYNELQKDKMAEAYSEIGMKGERRRGKGHDGLYQGLSTATKDTYDALHMQALPPR

SEQ ID NO: 609 - protein, 481 aa, synthetic construct
MALPVTALLLPLALLLHAARPQVQLVQSGAEVKKPGASVKVSCKASGYTFTGYYMHWVRQAPGQGLEWMGWINPNSGDTGYAQKFQGRVTMTRDTSTSTVYMELSSLRSEDTAVYYCARSVNDYGDYDGYWGQGTLVTVSSGGGGSGGGGSGGGGSDIQMTQSPSSLSASVGDRVTITCQASQDISNYLNWYQQKPGKAPKLLIYDASNLETGVPSRFSGSGSGTDFTLTISSLQPEDFATYYCQQSYSTPPTFGQGTKVEIKTTTPAPRPPTPAPTIASQPLSLRPEACRPAAGGAVHTRGLDFACDIYIWAPLAGTCGVLLLSLVITLYCRRDQRLPPDAHKPPGGGSFRTPIQEEQADAHSTLAKIRVKFSRSADAPAYQQGQNQLYNELNLGRREEYDVLDKRRGRDPEMGGKPRRKNPQEGLYNELQKDKMAEAYSEIGMKGERRRGKGHDGLYQGLSTATKDTYDALHMQALPPR

SEQ ID NO: 610 - protein, 481 aa, synthetic construct
MALPVTALLLPLALLLHAARPQVQLVQSGAEVKKPGASVKVSCKASGYTFTGYYMHWVRQAPGQGLEWMGIINPSGGSTSYAQKFQGRVTMTRDTSTSTVYMELSSLRSEDTAVYYCARDYGDYDASFDYWGQGTLVTVSSGGGGSGGGGSGGGGSDIQMTQSPSSLSASVGDRVTITCRASQSIDNWLAWYQQKPGKAPKLLIYAASTLQSGVPSRFSGSGSGTDFTLTISSLQPEDFATYYCQQSYDSPPTFGQGTKLEIKTTTPAPRPPTPAPTIASQPLSLRPEACRPAAGGAVHTRGLDFACDIYIWAPLAGTCGVLLLSLVITLYCRRDQRLPPDAHKPPGGGSFRTPIQEEQADAHSTLAKIRVKFSRSADAPAYQQGQNQLYNELNLGRREEYDVLDKRRGRDPEMGGKPRRKNPQEGLYNELQKDKMAEAYSEIGMKGERRRGKGHDGLYQGLSTATKDTYDALHMQALPPR

SEQ ID NO: 611 - protein, 478 aa, synthetic construct
MALPVTALLLPLALLLHAARPQVQLVQSGAEVKKPGASVKVSCKASGYTFTSYDINWVRQAPGQGLEWMGIINPSDGSTIYAQNFQGRVTMTRDTSTSTVYMELSSLRSEDTAVYYCVKEEAWYFDLWGRGTLVTVSSGGGGSGGGGSGGGGSDIQMTQSPSSLSASVGDRVTITCQASQDISNYLNWYQQKPGKAPKLLIYDASNLETGVPSRFSGSGSGTDFTLTISSLQPEDFATYYCQQSYSTPLTFGGGTKVEIKTTTPAPRPPTPAPTIASQPLSLRPEACRPAAGGAVHTRGLDFACDIYIWAPLAGTCGVLLLSLVITLYCRRDQRLPPDAHKPPGGGSFRTPIQEEQADAHSTLAKIRVKFSRSADAPAYQQGQNQLYNELNLGRREEYDVLDKRRGRDPEMGGKPRRKNPQEGLYNELQKDKMAEAYSEIGMKGERRRGKGHDGLYQGLSTATKDTYDALHMQALPPR

SEQ ID NO: 612 - protein, 478 aa, synthetic construct
MALPVTALLLPLALLLHAARPQVQLVQSGAEVKKPGASVKVSCKASGYTFTSYYMHWVRQAPGQGLEWMGWMNPDNGDTGYAQMFQGRVTMTRDTSTSTVYMELSSLRSEDTAVYYCASGDYYDILYWGQGTLVTVSSGGGGSGGGGSGGGGSDIQMTQSPSSLSASVGDRVTITCQASQDISNYLNWYQQKPGKAPKLLIYDVSNLETGVPSRFSGSGSGTDFTLTISSLQPEDFATYYCQQANSFPLTFGGGTKVEIKTTTPAPRPPTPAPTIASQPLSLRPEACRPAAGGAVHTRGLDFACDIYIWAPLAGTCGVLLLSLVITLYCRRDQRLPPDAHKPPGGGSFRTPIQEEQADAHSTLAKIRVKFSRSADAPAYQQGQNQLYNELNLGRREEYDVLDKRRGRDPEMGGKPRRKNPQEGLYNELQKDKMAEAYSEIGMKGERRRGKGHDGLYQGLSTATKDTYDALHMQALPPR

SEQ ID NO: 613 - protein, 479 aa, synthetic construct
MALPVTALLLPLALLLHAARPQVQLVQSGAEVKKPGASVKVSCKASGYTFTSYYMHWVRQAPGQGLEWMGWMNPNSGDTGYAQKFQGRVTMTRDTSTSTVYMELSSLRSEDTAVYYCARGPSGYEFDYWGQGTLVTVSSGGGGSGGGGSGGGGSDIQMTQSPSSLSASVGDRVTITCRASQTISNYLNWYQQKPGKAPKLLIYDASSLESGVPSRFSGSGSGTDFTLTISSLQPEDFATYYCQQAISFPLTFGGGTKVEIKTTTPAPRPPTPAPTIASQPLSLRPEACRPAAGGAVHTRGLDFACDIYIWAPLAGTCGVLLLSLVITLYCRRDQRLPPDAHKPPGGGSFRTPIQEEQADAHSTLAKIRVKFSRSADAPAYQQGQNQLYNELNLGRREEYDVLDKRRGRDPEMGGKPRRKNPQEGLYNELQKDKMAEAYSEIGMKGERRRGKGHDGLYQGLSTATKDTYDALHMQALPPR

SEQ ID NO: 614 - protein, 483 aa, synthetic construct
MALPVTALLLPLALLLHAARPQVQLVQSGAEVKKPGASVKVSCKASGYTFTDYYMHWVRQAPGQGLEWMGIINPNSGGTNYAQKFQGRVTMTRDTSTSTVYMELSSLRSEDTAVYYCARDFSVYAAADGMDVWGQGTLVTVSSGGGGSGGGGSGGGGSDIQMTQSPSSLSASVGDRVTITCRASQSISSYLNWYQQKPGKAPKLLIYDASNLATGVPSRFSGSGSGTDFTLTISSLQPEDFATYYCQQSDSSPLTFGQGTKVEIKTTTPAPRPPTPAPTIASQPLSLRPEACRPAAGGAVHTRGLDFACDIYIWAPLAGTCGVLLLSLVITLYCRRDQRLPPDAHKPPGGGSFRTPIQEEQADAHSTLAKIRVKFSRSADAPAYQQGQNQLYNELNLGRREEYDVLDKRRGRDPEMGGKPRRKNPQEGLYNELQKDKMAEAYSEIGMKGERRRGKGHDGLYQGLSTATKDTYDALHMQALPPR

SEQ ID NO: 615 - protein, 482 aa, synthetic construct
MALPVTALLLPLALLLHAARPQVQLVQSGAEVKKPGASVKVSCKASGYTFTGYYMHWVRQAPGQGLEWMGIINPGDGGTIYAQNFQGRVTMTRDTSTSTVYMELSSLRSEDTAVYYCARGFGESAPDAFDIWGQGTMVTVSSGGGGSGGGGSGGGGSDIQMTQSPSSLSASVGDRVTITCQASQDISNYLNWYQQKPGKAPKLLIYGATTLQSGVPSRFSGSGSGTDFTLTISSLQPEDFATYYCQQADSFPYTFGQGTKLEIKTTTPAPRPPTPAPTIASQPLSLRPEACRPAAGGAVHTRGLDFACDIYIWAPLAGTCGVLLLSLVITLYCRRDQRLPPDAHKPPGGGSFRTPIQEEQADAHSTLAKIRVKFSRSADAPAYQQGQNQLYNELNLGRREEYDVLDKRRGRDPEMGGKPRRKNPQEGLYNELQKDKMAEAYSEIGMKGERRRGKGHDGLYQGLSTATKDTYDALHMQALPPR

SEQ ID NO: 616 - protein, 479 aa, synthetic construct
MALPVTALLLPLALLLHAARPQVQLVQSGAEVKKPGASVKVSCKASGYTFTGYYMHWVRQAPGQGLEWMGIINPSGGSTSYAQKFQGRVTMTRDTSTSTVYMELSSLRSEDTAVYYCAAGTEIYYMDVWGKGTTVTVSSGGGGSGGGGSGGGGSDIQMTQSPSSLSASVGDRVTITCRASQTIDIYLNWYQQKPGKAPKLLIYDASNLETGVPSRFSGSGSGTDFTLTISSLQPEDFATYYCQQADSFPLTFGGGTKVEIKTTTPAPRPPTPAPTIASQPLSLRPEACRPAAGGAVHTRGLDFACDIYIWAPLAGTCGVLLLSLVITLYCRRDQRLPPDAHKPPGGGSFRTPIQEEQADAHSTLAKIRVKFSRSADAPAYQQGQNQLYNELNLGRREEYDVLDKRRGRDPEMGGKPRRKNPQEGLYNELQKDKMAEAYSEIGMKGERRRGKGHDGLYQGLSTATKDTYDALHMQALPPR

SEQ ID NO: 617 - protein, 488 aa, synthetic construct
MALPVTALLLPLALLLHAARPQVQLVQSGAEVKKPGASVKVSCKASGGTFSSYAISWVRQAPGQGLEWMGMINPSDGATTYAQKFQGRVTMTRDTSTSTVYMELSSLRSEDTAVYYCARERELLHFATNYYYYGMDVWGQGTTVTVSSGGGGSGGGGSGGGGSDIQMTQSPSSLSASVGDRVTITCRASQGISNNLNWYQQKPGKAPKLLIYAASSLHSGVPSRFSGSGSGTDFTLTISSLQPEDFATYYCQQADAFPLTFGGGTKVEIKTTTPAPRPPTPAPTIASQPLSLRPEACRPAAGGAVHTRGLDFACDIYIWAPLAGTCGVLLLSLVITLYCRRDQRLPPDAHKPPGGGSFRTPIQEEQADAHSTLAKIRVKFSRSADAPAYQQGQNQLYNELNLGRREEYDVLDKRRGRDPEMGGKPRRKNPQEGLYNELQKDKMAEAYSEIGMKGERRRGKGHDGLYQGLSTATKDTYDALHMQALPPR

SEQ ID NO: 618 - protein, 484 aa, synthetic construct
MALPVTALLLPLALLLHAARPQVQLVQSGAEVKKPGASVKVSCKASGYTFTRNYMHWVRQAPGQGLEWMGWISPDNGVTNYAQNFQGRVTMTRDTSTSTVYMELSSLRSEDTAVYYCAKTQGSSSWYQWYFDLWGRGTLVTVSSGGGGSGGGGSGGGGSDIQMTQSPSSLSASVGDRVTITCRASQSIGTWLAWYQQKPGKAPKLLIYAASSLQSGVPSRFSGSGSGTDFTLTISSLQPEDFATYYCQQSYTTPITFGQGTKVEIKTTTPAPRPPTPAPTIASQPLSLRPEACRPAAGGAVHTRGLDFACDIYIWAPLAGTCGVLLLSLVITLYCRRDQRLPPDAHKPPGGGSFRTPIQEEQADAHSTLAKIRVKFSRSADAPAYQQGQNQLYNELNLGRREEYDVLDKRRGRDPEMGGKPRRKNPQEGLYNELQKDKMAEAYSEIGMKGERRRGKGHDGLYQGLSTATKDTYDALHMQALPPR

SEQ ID NO: 619 - protein, 480 aa, synthetic construct
MALPVTALLLPLALLLHAARPQVQLVQSGAEVKKPGASVKVSCKASGYTFTSYYMHWVRQAPGQGLEWMGIIDPGSGDTSYAQKFQGRVTMTRDTSTSTVYMELSSLRSEDTAVYYCARGSNWYDYFDYWGQGTLVTVSSGGGGSGGGGSGGGGSEIVMTQSPATLSVSPGERATLSCRASQSVSSYLAWYQQKPGQAPRLLIYGASTRATGIPARFSGSGSGTEFTLTISSLQSEDFAVYYCQQYDSYPPTFGGGTKVEIKTTTPAPRPPTPAPTIASQPLSLRPEACRPAAGGAVHTRGLDFACDIYIWAPLAGTCGVLLLSLVITLYCRRDQRLPPDAHKPPGGGSFRTPIQEEQADAHSTLAKIRVKFSRSADAPAYQQGQNQLYNELNLGRREEYDVLDKRRGRDPEMGGKPRRKNPQEGLYNELQKDKMAEAYSEIGMKGERRRGKGHDGLYQGLSTATKDTYDALHMQALPPR

SEQ ID NO: 620 - protein, 480 aa, synthetic construct
MALPVTALLLPLALLLHAARPQVQLVQSGAEVKKPGASVKVSCKASGYRLSDHYMHWVRQAPGQGLEWMGIINPSGGSTTYAQNFQGRVTMTRDTSTSTVYMELSSLRSEDTAVYYCASSYYGDYVLVNWGQGTLVTVSSGGGGSGGGGSGGGGSDIQMTQSPSSLSASVGDRVTITCQASQDISNYLNWYQQKPGKAPKLLIYAASTLESGVPSRFSGSGSGTDFTLTISSLQPEDFATYYCLQDYDYPLTFGQGTKLEIKTTTPAPRPPTPAPTIASQPLSLRPEACRPAAGGAVHTRGLDFACDIYIWAPLAGTCGVLLLSLVITLYCRRDQRLPPDAHKPPGGGSFRTPIQEEQADAHSTLAKIRVKFSRSADAPAYQQGQNQLYNELNLGRREEYDVLDKRRGRDPEMGGKPRRKNPQEGLYNELQKDKMAEAYSEIGMKGERRRGKGHDGLYQGLSTATKDTYDALHMQALPPR

SEQ ID NO: 621 - protein, 481 aa, synthetic construct
MALPVTALLLPLALLLHAARPQVQLVQSGAEVKKPGASVKVSCKASGYTFTDYYVHWVRQAPGQGLEWMGWINPNTGGTSFAQNFQGRVTMTRDTSTSTVYMELSSLRSEDTAVYYCARDLGQWLGEIDYWGQGTLVTVSSGGGGSGGGGSGGGGSDIQMTQSPSSLSASVGDRVTITCRASQTIYKWLAWYQQKPGKAPKLLIYDASSLESGVPSRFSGSGSGTDFTLTISSLQPEDFATYYCQQANSFPFTFGPGTKVDIKTTTPAPRPPTPAPTIASQPLSLRPEACRPAAGGAVHTRGLDFACDIYIWAPLAGTCGVLLLSLVITLYCRRDQRLPPDAHKPPGGGSFRTPIQEEQADAHSTLAKIRVKFSRSADAPAYQQGQNQLYNELNLGRREEYDVLDKRRGRDPEMGGKPRRKNPQEGLYNELQKDKMAEAYSEIGMKGERRRGKGHDGLYQGLSTATKDTYDALHMQALPPR

SEQ ID NO: 622 - protein, 485 aa, synthetic construct
MALPVTALLLPLALLLHAARPQVQLVQSGAEVKKPGASVKVSCKASGYTFTDYTDYFVHWVRQAPGQGLEWMGIFNPSDGSTSYAQEFQGRVTMTRDTSTSTVYMELSSLRSEDTAVYYCARGPYSSSWYYFDYWGQGTLVTVSSGGGGSGGGGSGGGGSDIQMTQSPSSLSASVGDRVTITCQASQDISNYLNWYQQKPGKAPKLLIYDASNLETGVPSRFSGSGSGTDFTLTISSLQPEDFATYYCQQAHSFPPTFGQGTKVEIKTTTPAPRPPTPAPTIASQPLSLRPEACRPAAGGAVHTRGLDFACDIYIWAPLAGTCGVLLLSLVITLYCRRDQRLPPDAHKPPGGGSFRTPIQEEQADAHSTLAKIRVKFSRSADAPAYQQGQNQLYNELNLGRREEYDVLDKRRGRDPEMGGKPRRKNPQEGLYNELQKDKMAEAYSEIGMKGERRRGKGHDGLYQGLSTATKDTYDALHMQALPPR

SEQ ID NO: 623 - protein, 481 aa, synthetic construct
MALPVTALLLPLALLLHAARPQVQLVQSGAEVKKPGASVKVSCKASGYIFTDYYMHWVRQAPGQGLEWMGIINPSGGDTLYAQKFQGRVTMTRDTSTSTVYMELSSLRSEDTAVYYCAREGVGAMGVFDYWGQGTLVTVSSGGGGSGGGGSGGGGSDIQMTQSPSSLSASVGDRVTITCRASTSISDYVHWYQQKPGKAPKLLIYDASSLQSGVPSRFSGSGSGTDFTLTISSLQPEDFATYYCQQSDSTPPTFGGGTKVEIKTTTPAPRPPTPAPTIASQPLSLRPEACRPAAGGAVHTRGLDFACDIYIWAPLAGTCGVLLLSLVITLYCRRDQRLPPDAHKPPGGGSFRTPIQEEQADAHSTLAKIRVKFSRSADAPAYQQGQNQLYNELNLGRREEYDVLDKRRGRDPEMGGKPRRKNPQEGLYNELQKDKMAEAYSEIGMKGERRRGKGHDGLYQGLSTATKDTYDALHMQALPPR

SEQ ID NO: 624 - protein, 483 aa, synthetic construct
MALPVTALLLPLALLLHAARPQVQLVQSGAEVKKPGASVKVSCKASGYTFTDHYIHWVRQAPGQGLEWMGWISAYNGKTNYAQKFQGRVTMTRDTSTSTVYMELSSLRSEDTAVYYCARDTIYYDFWSGYDYWGQGTLVTVSSGGGGSGGGGSGGGGSDIQMTQSPSSLSASVGDRVTITCRASQGISNNLNWYQQKPGKAPKLLIYYASTLQSGVPSRFSGSGSGTDFTLTISSLQPEDFATYYCQQSYSTPITFGQGTRLEIKTTTPAPRPPTPAPTIASQPLSLRPEACRPAAGGAVHTRGLDFACDIYIWAPLAGTCGVLLLSLVITLYCRRDQRLPPDAHKPPGGGSFRTPIQEEQADAHSTLAKIRVKFSRSADAPAYQQGQNQLYNELNLGRREEYDVLDKRRGRDPEMGGKPRRKNPQEGLYNELQKDKMAEAYSEIGMKGERRRGKGHDGLYQGLSTATKDTYDALHMQALPPR

SEQ ID NO: 625 - protein, 483 aa, synthetic construct
MALPVTALLLPLALLLHAARPQVQLVQSGAEVKKPGASVKVSCKASGYTFTSYYMHWVRQAPGQGLEWMGIINPSGGATIYAQKFQGRVTMTRDTSTSTVYMELSSLRSEDTAVYYCARSRGDYYGSGDFDYWGQGTLVTVSSGGGGSGGGGSGGGGSDIQMTQSPSSLSASVGDRVTITCRASQTISNYLNWYQQKPGKAPKLLIYDASTLEAGVPSRFSGSGSGTDFTLTISSLQPEDFATYYCQQSYNPPYTFGQGTKLEIKTTTPAPRPPTPAPTIASQPLSLRPEACRPAAGGAVHTRGLDFACDIYIWAPLAGTCGVLLLSLVITLYCRRDQRLPPDAHKPPGGGSFRTPIQEEQADAHSTLAKIRVKFSRSADAPAYQQGQNQLYNELNLGRREEYDVLDKRRGRDPEMGGKPRRKNPQEGLYNELQKDKMAEAYSEIGMKGERRRGKGHDGLYQGLSTATKDTYDALHMQALPPR

SEQ ID NO: 626 - protein, 479 aa, synthetic construct
MALPVTALLLPLALLLHAARPQVQLVQSGAEVKKPGASVKVSCKASGYTFTDYYMHWVRQAPGQGLEWMGIINPSGGSTSYAQKFQGRVTMTRDTSTSTVYMELSSLRSEDTAVYYCARGYFDHAFDIWGQGTMVTVSSGGGGSGGGGSGGGGSDIQMTQSPSSLSASVGDRVTITCRASQSISTYLNWYQQKPGKAPKLLIYDASNLEIGVPSRFSGSGSGTDFTLTISSLQPEDFATYYCQQSDSSPLTFGQGTKVEIKTTTPAPRPPTPAPTIASQPLSLRPEACRPAAGGAVHTRGLDFACDIYIWAPLAGTCGVLLLSLVITLYCRRDQRLPPDAHKPPGGGSFRTPIQEEQADAHSTLAKIRVKFSRSADAPAYQQGQNQLYNELNLGRREEYDVLDKRRGRDPEMGGKPRRKNPQEGLYNELQKDKMAEAYSEIGMKGERRRGKGHDGLYQGLSTATKDTYDALHMQALPPR

SEQ ID NO: 627 - protein, 485 aa, synthetic construct
MALPVTALLLPLALLLHAARPQVQLVQSGAEVKKPGASVKVSCKASGYTFTGYYMHWVRQAPGQGLEWMGIINPSGGDTIYAQKFQGRVTMTRDTSTSTVYMELSSLRSEDTAVYYCARGDSSSWYDYYYYMDVWGKGTTVTVSSGGGGSGGGGSGGGGSDIQMTQSPSSLSASVGDRVTITCQASQDISNYLNWYQQKPGKAPKLLIYAASSLQSGVPSRFSGSGSGTDFTLTISSLQPEDFATYYCQQSYRTPLTFGGGTKVEIKTTTPAPRPPTPAPTIASQPLSLRPEACRPAAGGAVHTRGLDFACDIYIWAPLAGTCGVLLLSLVITLYCRRDQRLPPDAHKPPGGGSFRTPIQEEQADAHSTLAKIRVKFSRSADAPAYQQGQNQLYNELNLGRREEYDVLDKRRGRDPEMGGKPRRKNPQEGLYNELQKDKMAEAYSEIGMKGERRRGKGHDGLYQGLSTATKDTYDALHMQALPPR

SEQ ID NO: 628 - protein, 480 aa, synthetic construct
MALPVTALLLPLALLLHAARPQVQLVQSGAEVKKPGASVKVSCKASGYTFTDYFTHWVRQAPGQGLEWMGWINTYDGNTNYAQKFQGRVTMTRDTSTSTVYMELSSLRSEDTAVYYCAREMEWLGQVDYWGQGTLVTVSSGGGGSGGGGSGGGGSDIQMTQSPSSLSASVGDRVTITCRASQDIRNDLGWYQQKPGKAPKLLIYAASNLETGVPSRFSGSGSGTDFTLTISSLQPEDFATYYCQQSYSAPFTFGPGTKVDIKTTTPAPRPPTPAPTIASQPLSLRPEACRPAAGGAVHTRGLDFACDIYIWAPLAGTCGVLLLSLVITLYCRRDQRLPPDAHKPPGGGSFRTPIQEEQADAHSTLAKIRVKFSRSADAPAYQQGQNQLYNELNLGRREEYDVLDKRRGRDPEMGGKPRRKNPQEGLYNELQKDKMAEAYSEIGMKGERRRGKGHDGLYQGLSTATKDTYDALHMQALPPR

SEQ ID NO: 629 - protein, 480 aa, synthetic construct
MALPVTALLLPLALLLHAARPQVQLVQSGAEVKKPGASVKVSCKASGYTFTSYYIHWVRQAPGQGLEWMGRINPNGGGTNYAQKFQGRVTMTRDTSTSTVYMELSSLRSEDTAVYYCARGHRGGGGIDYWGQGTLVTVSSGGGGSGGGGSGGGGSDIQMTQSPSSLSASVGDRVTITCRASQEISNYLAWYQQKPGKAPKLLIYDASNLQTGVPSRFSGSGSGTDFTLTISSLQPEDFATYYCQQSYSTPFTFGPGTKVDIKTTTPAPRPPTPAPTIASQPLSLRPEACRPAAGGAVHTRGLDFACDIYIWAPLAGTCGVLLLSLVITLYCRRDQRLPPDAHKPPGGGSFRTPIQEEQADAHSTLAKIRVKFSRSADAPAYQQGQNQLYNELNLGRREEYDVLDKRRGRDPEMGGKPRRKNPQEGLYNELQKDKMAEAYSEIGMKGERRRGKGHDGLYQGLSTATKDTYDALHMQALPPR

SEQ ID NO: 630 - protein, 480 aa, synthetic construct
MALPVTALLLPLALLLHAARPQVQLVQSGAEVKKPGASVKVSCKASGGTFSSYAISWVRQAPGQGLEWMGWISPNSGDTHYAQKFQGRVTMTRDTSTSTVYMELSSLRSEDTAVYYCARDWGSGWYVDYWGQGTLVTVSSGGGGSGGGGSGGGGSDIQMTQSPSSLSASVGDRVTITCQASQDISDSLNWYQQKPGKAPKLLIYSASSLQSGVPSRFSGSGSGTDFTLTISSLQPEDFATYYCQQSFTTPYTFGQGTKVEIKTTTPAPRPPTPAPTIASQPLSLRPEACRPAAGGAVHTRGLDFACDIYIWAPLAGTCGVLLLSLVITLYCRRDQRLPPDAHKPPGGGSFRTPIQEEQADAHSTLAKIRVKFSRSADAPAYQQGQNQLYNELNLGRREEYDVLDKRRGRDPEMGGKPRRKNPQEGLYNELQKDKMAEAYSEIGMKGERRRGKGHDGLYQGLSTATKDTYDALHMQALPPR

SEQ ID NO: 631 - protein, 480 aa, synthetic construct
MALPVTALLLPLALLLHAARPQVQLVQSGAEVKKPGSSVKVSCKASGGTFNSYGISWVRQAPGQGLEWMGGIIPIFGTANYAQKFQGRVTITADESTSTAYMELSSLRSEDTAVYYCARDTYGDDAFDIWGQGTMVTVSSGGGGSGGGGSGGGGSDIQMTQSPSSLSASVGDRVTITCRASQSISSWLAWYQQKPGKAPKLLIYDASNLETGVPSRFSGSGSGTDFTLTISSLQPEDFATYYCQQNFSPPLTFGQGTRLEIKTTTPAPRPPTPAPTIASQPLSLRPEACRPAAGGAVHTRGLDFACDIYIWAPLAGTCGVLLLSLVITLYCRRDQRLPPDAHKPPGGGSFRTPIQEEQADAHSTLAKIRVKFSRSADAPAYQQGQNQLYNELNLGRREEYDVLDKRRGRDPEMGGKPRRKNPQEGLYNELQKDKMAEAYSEIGMKGERRRGKGHDGLYQGLSTATKDTYDALHMQALPPR

SEQ ID NO: 632 - protein, 485 aa, synthetic construct
MALPVTALLLPLALLLHAARPQVQLVQSGAEVKKPGASVKVSCKASGYSFTSYYMHWVRQAPGQGLEWMGIINPSGGTTSYAQKFQGRVTMTRDTSTSTVYMELSSLRSEDTAVYYCARDNSPYSSSWWDYFDYWGQGTLVTVSSGGGGSGGGGSGGGGSDIQMTQSPSSLSASVGDRVTITCRASQDIRHYLAWYQQKPGKAPKLLIYDASSLQSGVPSRFSGSGSGTDFTLTISSLQPEDFATYYCQQTYDAPITFGQGTRLEIKTTTPAPRPPTPAPTIASQPLSLRPEACRPAAGGAVHTRGLDFACDIYIWAPLAGTCGVLLLSLVITLYCRRDQRLPPDAHKPPGGGSFRTPIQEEQADAHSTLAKIRVKFSRSADAPAYQQGQNQLYNELNLGRREEYDVLDKRRGRDPEMGGKPRRKNPQEGLYNELQKDKMAEAYSEIGMKGERRRGKGHDGLYQGLSTATKDTYDALHMQALPPR

SEQ ID NO: 633 - protein, 483 aa, synthetic construct
MALPVTALLLPLALLLHAARPQVQLVQSGAEVKKPGASVKVSCKASGYTFTDYYIHWVRQAPGQGLEWMGWITPNSGYTYYAQNFQGRVTMTRDTSTSTVYMELSSLRSEDTAVYYCARNTDCYGDFLGLDVWGQGTTVTVSSGGGGSGGGGSGGGGSDIVMTQSPDSLAVSLGERATINCRASSSISNYLAWYQQKPGQPPKLLIYGASTRASGVPDRFSGSGSGTDFTLTISSLQAEDVAVYYCQQSYSTPLTFGQGTKVEIKTTTPAPRPPTPAPTIASQPLSLRPEACRPAAGGAVHTRGLDFACDIYIWAPLAGTCGVLLLSLVITLYCRRDQRLPPDAHKPPGGGSFRTPIQEEQADAHSTLAKIRVKFSRSADAPAYQQGQNQLYNELNLGRREEYDVLDKRRGRDPEMGGKPRRKNPQEGLYNELQKDKMAEAYSEIGMKGERRRGKGHDGLYQGLSTATKDTYDALHMQALPPR

SEQ ID NO: 634 - protein, 483 aa, synthetic construct
MALPVTALLLPLALLLHAARPQVQLVQSGAEVKKPGASVKVSCKASGYTFNGYLMHWVRQAPGQGLEWMGIVNPSDGSTGYAQKFQGRVTMTRDTSTSTVYMELSSLRSEDTAVYYCAKDTGLRYFDWLLDYWGQGTLVTVSSGGGGSGGGGSGGGGSDIQMTQSPSSLSASVGDRVTITCRASQGITNFLAWYQQKPGKAPKLLIYDASNLETGVPSRFSGSGSGTDFTLTISSLQPEDFATYYCQQSYGAPLTFGQGTRLEIKTTTPAPRPPTPAPTIASQPLSLRPEACRPAAGGAVHTRGLDFACDIYIWAPLAGTCGVLLLSLVITLYCRRDQRLPPDAHKPPGGGSFRTPIQEEQADAHSTLAKIRVKFSRSADAPAYQQGQNQLYNELNLGRREEYDVLDKRRGRDPEMGGKPRRKNPQEGLYNELQKDKMAEAYSEIGMKGERRRGKGHDGLYQGLSTATKDTYDALHMQALPPR

SEQ ID NO: 635 - protein, 479 aa, synthetic construct
MALPVTALLLPLALLLHAARPQVQLVQSGAEVKKPGASVKVSCKASGYTFTSYYMHWVRQAPGQGLEWMGIIDPSGGRTIYAQRFQGRVTMTRDTSTSTVYMELSSLRSEDTAVYYCARHEAGGIFDYWGQGTLVTVSSGGGGSGGGGSGGGGSDIQMTQSPSSLSASVGDRVTITCQASQDISNYLNWYQQKPGKAPKLLIYSASTLQSGVPSRFSGSGSGTDFTLTISSLQPEDFATYYCQQSYSSPYRFGQGTKVEIKTTTPAPRPPTPAPTIASQPLSLRPEACRPAAGGAVHTRGLDFACDIYIWAPLAGTCGVLLLSLVITLYCRRDQRLPPDAHKPPGGGSFRTPIQEEQADAHSTLAKIRVKFSRSADAPAYQQGQNQLYNELNLGRREEYDVLDKRRGRDPEMGGKPRRKNPQEGLYNELQKDKMAEAYSEIGMKGERRRGKGHDGLYQGLSTATKDTYDALHMQALPPR

SEQ ID NO: 636 - protein, 487 aa, synthetic construct
MALPVTALLLPLALLLHAARPQVQLVQSGAEVKKPGSSVKVSCKASGYTFSDSYMHWVRQAPGQGLEWVGGIIPMAGIPAYAEEFQGRVTITADESTSTAYMELSSLRSEDTAVYYCARADDYGGNWYFDLWGRGTLVTVSSGGGGSGGGGSGGGGSDIVMTQSPLSLPVTPGEPASISCRSSQSLLHSNGYNYLDWYLQKPGQSPQLLIYAASSLQSGVPDRFSGSGSGTDFTLKISRVEAEDVGVYYCMQGAHWPPTFGQGTKLEIKTTTPAPRPPTPAPTIASQPLSLRPEACRPAAGGAVHTRGLDFACDIYIWAPLAGTCGVLLLSLVITLYCRRDQRLPPDAHKPPGGGSFRTPIQEEQADAHSTLAKIRVKFSRSADAPAYQQGQNQLYNELNLGRREEYDVLDKRRGRDPEMGGKPRRKNPQEGLYNELQKDKMAEAYSEIGMKGERRRGKGHDGLYQGLSTATKDTYDALHMQALPPR

SEQ ID NO: 637 - protein, 481 aa, synthetic construct
MALPVTALLLPLALLLHAARPQVQLVQSGAEVKKPGASVKVSCKASGYIFTDYYMHWVRQAPGQGLEWMGIINPSGGSTSYAQKFQGRVTMTRDTSTSTVYMELSSLRSEDTAVYYCARDSGWYESWFDPWGQGTLVTVSSGGGGSGGGGSGGGGSDIQMTQSPSSLSASVGDRVTITCRASQDIRDGLGWYQQKPGKAPKLLIYAASTLQSGVPSRFSGSGSGTDFTLTISSLQPEDFATYYCQQSYGTPPTFGQGTKVEIKTTTPAPRPPTPAPTIASQPLSLRPEACRPAAGGAVHTRGLDFACDIYIWAPLAGTCGVLLLSLVITLYCRRDQRLPPDAHKPPGGGSFRTPIQEEQADAHSTLAKIRVKFSRSADAPAYQQGQNQLYNELNLGRREEYDVLDKRRGRDPEMGGKPRRKNPQEGLYNELQKDKMAEAYSEIGMKGERRRGKGHDGLYQGLSTATKDTYDALHMQALPPR

SEQ ID NO: 638 - protein, 482 aa, synthetic construct
MALPVTALLLPLALLLHAARPQVQLVQSGAEVKKPGASVKVSCKASGYTFTDYYLHWVRQAPGQGLEWMGWISAYNGNTNYAQKFQGRVTMTRDTSTSTVYMELSSLRSEDTAVYYCAREIVGATEDWYFDLWGRGTLVTVSSGGGGSGGGGSGGGGSEIVMTQSPATLSVSPGERATLSCRASQSVSSYLAWYQQKPGQAPRLLIYGASTRATGIPARFSGSGSGTEFTLTISSLQSEDFAVYYCQQYDSSPTFGQGTKVEIKTTTPAPRPPTPAPTIASQPLSLRPEACRPAAGGAVHTRGLDFACDIYIWAPLAGTCGVLLLSLVITLYCRRDQRLPPDAHKPPGGGSFRTPIQEEQADAHSTLAKIRVKFSRSADAPAYQQGQNQLYNELNLGRREEYDVLDKRRGRDPEMGGKPRRKNPQEGLYNELQKDKMAEAYSEIGMKGERRRGKGHDGLYQGLSTATKDTYDALHMQALPPR

SEQ ID NO: 639 - protein, 480 aa, synthetic construct
MALPVTALLLPLALLLHAARPQVQLVQSGAEVKKPGASVKVSCKASGYTFTAYYLHWVRQAPGQGLEWMGMINPNNGGTIYAQTFQGRVTMTRDTSTSTVYMELSSLRSEDTAVYYCARDLGGYVLFDYWGQGTLVTVSSGGGGSGGGGSGGGGSDIQMTQSPSSLSASVGDRVTITCRASQSISSYLNWYQQKPGKAPKLLIYDASNLETGVPSRFSGSGSGTDFTLTISSLQPEDFATYYCQQSHSAPITFGQGTRLEIKTTTPAPRPPTPAPTIASQPLSLRPEACRPAAGGAVHTRGLDFACDIYIWAPLAGTCGVLLLSLVITLYCRRDQRLPPDAHKPPGGGSFRTPIQEEQADAHSTLAKIRVKFSRSADAPAYQQGQNQLYNELNLGRREEYDVLDKRRGRDPEMGGKPRRKNPQEGLYNELQKDKMAEAYSEIGMKGERRRGKGHDGLYQGLSTATKDTYDALHMQALPPR

SEQ ID NO: 640 - protein, 480 aa, synthetic construct
MALPVTALLLPLALLLHAARPQVQLVQSGAEVKKPGASVKVSCKASGYTFTDYYIHWVRQAPGQGLEWMGMINPRGGSTTYAQSFQGRVTMTRDTSTSTVYMELSSLRSEDTAVYYCARDLGDYGDYDYWGQGTLVTVSSGGGGSGGGGSGGGGSDIQMTQSPSSLSASVGDRVTITCRASQSISTNLAWYQQKPGKAPKLLIYDASYLEAGVPSRFSGSGSGTDFTLTISSLQPEDFATYYCQQSYSTPPTFGQGTKLEIKTTTPAPRPPTPAPTIASQPLSLRPEACRPAAGGAVHTRGLDFACDIYIWAPLAGTCGVLLLSLVITLYCRRDQRLPPDAHKPPGGGSFRTPIQEEQADAHSTLAKIRVKFSRSADAPAYQQGQNQLYNELNLGRREEYDVLDKRRGRDPEMGGKPRRKNPQEGLYNELQKDKMAEAYSEIGMKGERRRGKGHDGLYQGLSTATKDTYDALHMQALPPR

SEQ ID NO: 641 - protein, 491 aa, synthetic construct
MALPVTALLLPLALLLHAARPEVQLLESGGGLVQPGGSLRLSCAASGFTFSNSDMNWVRQAPGKGLEWVSAISGGGDTLYYADSVKGRFTISRDNSKNTLYLQMNSLRAEDTAVYYCAMASALDSSGDNEAFDIWGQGTTVTVSSGGGGSGGGGSGGGGSDIVMTQSPDSLAVSLGERATINCKSSQSVLYSSNNKNYLAWYQQKPGQPPKLLIYWASTRDSGVPDRFSGSGSGTDFTLTISSLQAEDVAVYYCQQYYGFPPTFGQGTRLEIKTTTPAPRPPTPAPTIASQPLSLRPEACRPAAGGAVHTRGLDFACDIYIWAPLAGTCGVLLLSLVITLYCRRDQRLPPDAHKPPGGGSFRTPIQEEQADAHSTLAKIRVKFSRSADAPAYQQGQNQLYNELNLGRREEYDVLDKRRGRDPEMGGKPRRKNPQEGLYNELQKDKMAEAYSEIGMKGERRRGKGHDGLYQGLSTATKDTYDALHMQALPPR

SEQ ID NO: 642 - protein, 483 aa, synthetic construct
MALPVTALLLPLALLLHAARPQVQLVQSGAEVKKPGASVKVSCKASGYTFTSYYMHWVRQAPGQGLEWMGWINPNNGGTSYAQKFQGRVTMTRDTSTSTVYMELSSLRSEDTAVYYCARVEDDFWSGPSFDYWGQGTLVTVSSGGGGSGGGGSGGGGSDIQMTQSPSSLSASVGDRVTITCQASHDISKFLNWYQQKPGKAPKLLIYDASNLQRGVPSRFSGSGSGTDFTLTISSLQPEDFATYYCQQTYSFPFTFGQGTKLEIKTTTPAPRPPTPAPTIASQPLSLRPEACRPAAGGAVHTRGLDFACDIYIWAPLAGTCGVLLLSLVITLYCRRDQRLPPDAHKPPGGGSFRTPIQEEQADAHSTLAKIRVKFSRSADAPAYQQGQNQLYNELNLGRREEYDVLDKRRGRDPEMGGKPRRKNPQEGLYNELQKDKMAEAYSEIGMKGERRRGKGHDGLYQGLSTATKDTYDALHMQALPPR

SEQ ID NO: 643 - protein, 485 aa, synthetic construct
MALPVTALLLPLALLLHAARPQVQLVQSGAEVKKPGSSVKVSCKASGGTFTNYAFSWVRQAPGQGLEWMGGIIPISGAANYAQKFQGRVTITADESTSTAYMELSSLRSEDTAVYYCARGSGLDDAFDIWGQGTMVTVSSGGGGSGGGGSGGGGSDIVMTQSPLSLPVTPGEPASISCRSSQSLLHSNGYNYLDWYLQKPGQSPQLLIYDASSLQSGVPDRFSGSGSGTDFTLKISRVEAEDVGVYYCMQARQTPLTFGQGTRLEIKTTTPAPRPPTPAPTIASQPLSLRPEACRPAAGGAVHTRGLDFACDIYIWAPLAGTCGVLLLSLVITLYCRRDQRLPPDAHKPPGGGSFRTPIQEEQADAHSTLAKIRVKFSRSADAPAYQQGQNQLYNELNLGRREEYDVLDKRRGRDPEMGGKPRRKNPQEGLYNELQKDKMAEAYSEIGMKGERRRGKGHDGLYQGLSTATKDTYDALHMQALPPR

SEQ ID NO: 644 - protein, 495 aa, synthetic construct
MALPVTALLLPLALLLHAARPQVQLVQSGAEVKKPGASVKVSCKASGYTFTAYYMHWVRQAPGQGLEWMGWMNPNSGNTGYAQKFQGRVTMTRDTSTSTVYMELSSLRSEDTAVYYCAREGRIDYGDYDDYYYYYGMDVWGQGTTVTVSSGGGGSGGGGSGGGGSDIVMTQSPLSLPVTPGEPASISCRSSQSLLHSNGYNYLDWYLQKPGQSPQLLIYAASNLQGGVPDRFSGSGSGTDFTLKISRVEAEDVGVYYCMQTLESPVTFGGGTKVEIKTTTPAPRPPTPAPTIASQPLSLRPEACRPAAGGAVHTRGLDFACDIYIWAPLAGTCGVLLLSLVITLYCRRDQRLPPDAHKPPGGGSFRTPIQEEQADAHSTLAKIRVKFSRSADAPAYQQGQNQLYNELNLGRREEYDVLDKRRGRDPEMGGKPRRKNPQEGLYNELQKDKMAEAYSEIGMKGERRRGKGHDGLYQGLSTATKDTYDALHMQALPPR

SEQ ID NO: 645 - protein, 481 aa, synthetic construct
MALPVTALLLPLALLLHAARPQVQLVQSGAEVKKPGASVKVSCKASGYTFTDYYVHWVRQAPGQGLEWMGTINPSGGSTSYAQKFQGRVTMTRDTSTSTVYMELSSLRSEDTAVYYCARDQGLWFTGFDYWGQGTLVTVSSGGGGSGGGGSGGGGSDIQMTQSPSSLSASVGDRVTITCRASQGISNNLNWYQQKPGKAPKLLIYDASNLERGVPSRFSGSGSGTDFTLTISSLQPEDFATYYCQQSYDGPITFGQGTRLEIKTTTPAPRPPTPAPTIASQPLSLRPEACRPAAGGAVHTRGLDFACDIYIWAPLAGTCGVLLLSLVITLYCRRDQRLPPDAHKPPGGGSFRTPIQEEQADAHSTLAKIRVKFSRSADAPAYQQGQNQLYNELNLGRREEYDVLDKRRGRDPEMGGKPRRKNPQEGLYNELQKDKMAEAYSEIGMKGERRRGKGHDGLYQGLSTATKDTYDALHMQALPPR

SEQ ID NO: 646 - protein, 481 aa, synthetic construct
MALPVTALLLPLALLLHAARPQVQLVQSGAEVKKPGASVKVSCKASGYTFTAYHMHWVRQAPGQGLEWMGIINPGDGATGYAQNLQGRVTMTRDTSTSTVYMELSSLRSEDTAVYYCAGEGISGSDAFDIWGQGTLVTVSSGGGGSGGGGSGGGGSDIQMTQSPSSLSASVGDRVTITCRASQSISSWLAWYQQKPGKAPKLLIYAASSLQSGVPSRFSGSGSGTDFTLTISSLQPEDFATYYCLQDYSYPLTFGGGTKVEIKTTTPAPRPPTPAPTIASQPLSLRPEACRPAAGGAVHTRGLDFACDIYIWAPLAGTCGVLLLSLVITLYCRRDQRLPPDAHKPPGGGSFRTPIQEEQADAHSTLAKIRVKFSRSADAPAYQQGQNQLYNELNLGRREEYDVLDKRRGRDPEMGGKPRRKNPQEGLYNELQKDKMAEAYSEIGMKGERRRGKGHDGLYQGLSTATKDTYDALHMQALPPR

SEQ ID NO: 647 - protein, 479 aa, synthetic construct
MALPVTALLLPLALLLHAARPQVQLVQSGAEVKKPGSSVKVSCKASGGTFSSYAISWVRQAPGQGLEWMGWMNPNSGNTGYAQKFQGRVTITADESTSTAYMELSSLRSEDTAVYYCAWGVDPYYFDYWGQGTLVTVSSGGGGSGGGGSGGGGSDIQMTQSPSSLSASVGDRVTITCRASQSINRWLAWYQQKPGKAPKLLIYDASNLETGVPSRFSGSGSGTDFTLTISSLQPEDFATYYCQQSYITPLTFGGGTKVEIKTTTPAPRPPTPAPTIASQPLSLRPEACRPAAGGAVHTRGLDFACDIYIWAPLAGTCGVLLLSLVITLYCRRDQRLPPDAHKPPGGGSFRTPIQEEQADAHSTLAKIRVKFSRSADAPAYQQGQNQLYNELNLGRREEYDVLDKRRGRDPEMGGKPRRKNPQEGLYNELQKDKMAEAYSEIGMKGERRRGKGHDGLYQGLSTATKDTYDALHMQALPPR

SEQ ID NO: 648 - protein, 479 aa, synthetic construct
MALPVTALLLPLALLLHAARPQVQLVQSGAEVKKPGASVKVSCKASGYTFTSYYMHWVRQAPGQGLEWMGIFNPSDGSTSYAQKFQGRVTMTRDTSTSTVYMELSSLRSEDTAVYYCARDVGETTFDPWGQGTLVTVSSGGGGSGGGGSGGGGSDIQMTQSPSSLSASVGDRVTITCQASQDISNYLNWYQQKPGKAPKLLIYDASSLESGVPSRFSGSGSGTDFTLTISSLQPEDFATYYCQQTNSFPITFGQGTRLEIKTTTPAPRPPTPAPTIASQPLSLRPEACRPAAGGAVHTRGLDFACDIYIWAPLAGTCGVLLLSLVITLYCRRDQRLPPDAHKPPGGGSFRTPIQEEQADAHSTLAKIRVKFSRSADAPAYQQGQNQLYNELNLGRREEYDVLDKRRGRDPEMGGKPRRKNPQEGLYNELQKDKMAEAYSEIGMKGERRRGKGHDGLYQGLSTATKDTYDALHMQALPPR

SEQ ID NO: 649 - protein, 484 aa, synthetic construct
MALPVTALLLPLALLLHAARPQVQLVQSGAEVKKPGASVKVSCKASGYTFTSYGISWVRQAPGQGLEWMGWISAYNGHTNYAQKFQGRVTMTRDTSTSTVYMELSSLRSEDTAVYYCARDSVRGWDYYYGMGVWGQGTTVTVSSGGGGSGGGGSGGGGSDIQMTQSPSSLSASVGDRVTITCQASQDIRNFLNWYQQKPGKAPKLLIYAASTLQSGVPSRFSGSGSGTDFTLTISSLQPEDFATYYCQQSYSAPSTFGQGTKLEIKTTTPAPRPPTPAPTIASQPLSLRPEACRPAAGGAVHTRGLDFACDIYIWAPLAGTCGVLLLSLVITLYCRRDQRLPPDAHKPPGGGSFRTPIQEEQADAHSTLAKIRVKFSRSADAPAYQQGQNQLYNELNLGRREEYDVLDKRRGRDPEMGGKPRRKNPQEGLYNELQKDKMAEAYSEIGMKGERRRGKGHDGLYQGLSTATKDTYDALHMQALPPR

SEQ ID NO: 650 - protein, 481 aa, synthetic construct
MALPVTALLLPLALLLHAARPQVQLVQSGAEVKKPGSSVKVSCKASGYTFIDYYMHWVRQAPGQGLEWMGWMNPHSGNSDNAPKFQGRVTITADESTSTAYMELSSLRSEDTAVYYCARGYSGYDLTADYWGQGTLVTVSSGGGGSGGGGSGGGGSDIQMTQSPSSLSASVGDRVTITCRASQSISNYLNWYQQKPGKAPKLLIYDASNLETGVPSRFSGSGSGTDFTLTISSLQPEDFATYYCQQSYSTPITFGQGTRLEIKTTTPAPRPPTPAPTIASQPLSLRPEACRPAAGGAVHTRGLDFACDIYIWAPLAGTCGVLLLSLVITLYCRRDQRLPPDAHKPPGGGSFRTPIQEEQADAHSTLAKIRVKFSRSADAPAYQQGQNQLYNELNLGRREEYDVLDKRRGRDPEMGGKPRRKNPQEGLYNELQKDKMAEAYSEIGMKGERRRGKGHDGLYQGLSTATKDTYDALHMQALPPR

SEQ ID NO: 651 - protein, 490 aa, synthetic construct
MALPVTALLLPLALLLHAARPQVQLVQSGAEVKKPGASVKVSCKASGYTFTGQYMHWVRQAPGQGLEWMGWINPNTGDTNYAQKFQGRVTMTRDTSTSTVYMELSSLRSEDTAVYYCARDSVFEVEGGTDYYYYYGMDVWGQGTMVTVSSGGGGSGGGGSGGGGSDIQMTQSPSSLSASVGDRVTITCRASETISGWLAWYQQKPGKAPKLLIYDASNLETGVPSRFSGSGSGTDFTLTISSLQPEDFATYYCQQSYSTPWTFGQGTKLEIKTTTPAPRPPTPAPTIASQPLSLRPEACRPAAGGAVHTRGLDFACDIYIWAPLAGTCGVLLLSLVITLYCRRDQRLPPDAHKPPGGGSFRTPIQEEQADAHSTLAKIRVKFSRSADAPAYQQGQNQLYNELNLGRREEYDVLDKRRGRDPEMGGKPRRKNPQEGLYNELQKDKMAEAYSEIGMKGERRRGKGHDGLYQGLSTATKDTYDALHMQALPPR

SEQ ID NO: 652 - protein, 480 aa, synthetic construct
MALPVTALLLPLALLLHAARPQVQLVQSGAEVKKPGASVKVSCKASGYTFTSYDINWVRQAPGQGLEWMGVINPSGGGTSYAQKFQGRVTMTRDTSTSTVYMELSSLRSEDTAVYYCARYSGYDWVFDYWGQGTLVTVSSGGGGSGGGGSGGGGSDIQMTQSPSSLSASVGDRVTITCRASQGIGSWLAWYQQKPGKAPKLLIYAASTLQSGVPSRFSGSGSGTDFTLTISSLQPEDFATYYCQQSYSTPWTFGPGTKVDIKTTTPAPRPPTPAPTIASQPLSLRPEACRPAAGGAVHTRGLDFACDIYIWAPLAGTCGVLLLSLVITLYCRRDQRLPPDAHKPPGGGSFRTPIQEEQADAHSTLAKIRVKFSRSADAPAYQQGQNQLYNELNLGRREEYDVLDKRRGRDPEMGGKPRRKNPQEGLYNELQKDKMAEAYSEIGMKGERRRGKGHDGLYQGLSTATKDTYDALHMQALPPR

SEQ ID NO: 653 - protein, 481 aa, synthetic construct
MALPVTALLLPLALLLHAARPQVQLVQSGAEVKKPGASVKVSCKASGYTFANYYMHWVRQAPGQGLEWMGIINPSGGSTSYAQKFQGRVTMTRDTSTSTVYMELSSLRSEDTAVYYCARDSGSYFGWFDPWGQGTLVTVSSGGGGSGGGGSGGGGSDIQMTQSPSSLSASVGDRVTITCRASQSISSSLAWYQQKPGKAPKLLIYDASSLQSGVPSRFSGSGSGTDFTLTISSLQPEDFATYYCQQSYNTPPTFGGGTKLEIKTTTPAPRPPTPAPTIASQPLSLRPEACRPAAGGAVHTRGLDFACDIYIWAPLAGTCGVLLLSLVITLYCRRDQRLPPDAHKPPGGGSFRTPIQEEQADAHSTLAKIRVKFSRSADAPAYQQGQNQLYNELNLGRREEYDVLDKRRGRDPEMGGKPRRKNPQEGLYNELQKDKMAEAYSEIGMKGERRRGKGHDGLYQGLSTATKDTYDALHMQALPPR

SEQ ID NO: 654 - protein, 481 aa, synthetic construct
MALPVTALLLPLALLLHAARPQVQLVQSGAEVKKPGASVKVSCKASGYTFTTYYMHWVRQAPGQGLEWMGIINPTGGSTYYAQKFQGRVTMTRDTSTSTVYMELSSLRSEDTAVYYCARDSGNYQGIFDYWGQGTLVTVSSGGGGSGGGGSGGGGSDIQMTQSPSSLSASVGDRVTITCRASQGIGGYLAWYQQKPGKAPKLLIYDASNLETGVPSRFSGSGSGTDFTLTISSLQPEDFATYYCQQSYDSPPTFGQGTRLEIKTTTPAPRPPTPAPTIASQPLSLRPEACRPAAGGAVHTRGLDFACDIYIWAPLAGTCGVLLLSLVITLYCRRDQRLPPDAHKPPGGGSFRTPIQEEQADAHSTLAKIRVKFSRSADAPAYQQGQNQLYNELNLGRREEYDVLDKRRGRDPEMGGKPRRKNPQEGLYNELQKDKMAEAYSEIGMKGERRRGKGHDGLYQGLSTATKDTYDALHMQALPPR

SEQ ID NO: 655 - protein, 480 aa, synthetic construct
MALPVTALLLPLALLLHAARPQVQLVQSGAEVKKPGASVKVSCKASGNTFTSYYMHWVRQAPGQGLEWMGWINPNSGDTNYAQNFQGRVTMTRDTSTSTVYMELSSLRSEDTAVYYCARGVSGYDLFDYWGQGTLVTVSSGGGGSGGGGSGGGGSDIQMTQSPSSLSASVGDRVTITCRASQSVSSYLNWYQQKPGKAPKLLIYDTSNLETGVPSRFSGSGSGTDFTLTISSLQPEDFATYYCQQAHSFPLTFGGGTKVEIKTTTPAPRPPTPAPTIASQPLSLRPEACRPAAGGAVHTRGLDFACDIYIWAPLAGTCGVLLLSLVITLYCRRDQRLPPDAHKPPGGGSFRTPIQEEQADAHSTLAKIRVKFSRSADAPAYQQGQNQLYNELNLGRREEYDVLDKRRGRDPEMGGKPRRKNPQEGLYNELQKDKMAEAYSEIGMKGERRRGKGHDGLYQGLSTATKDTYDALHMQALPPR

SEQ ID NO: 656 - protein, 480 aa, synthetic construct
MALPVTALLLPLALLLHAARPEVQLVESGGGLVKPGGSLRLSCAASGFTFSSYGMHWVRQAPGKGLEWVASIKHDGSEQYYVDSVKGRFTISRDDSKNTLYLQMNSLKTEDTAVYYCAASGVDVWGQGTTVTVSSGGGGSGGGGSGGGGSDIVMTQSPLSLPVTPGEPASISCRSSQSLLHSNGYNYLDWYLQKPGQSPQLLIYLGSTRASGVPDRFSGSGSGTDFTLKISRVEAEDVGVYYCMQALDTPLTFGGGTKLEIKTTTPAPRPPTPAPTIASQPLSLRPEACRPAAGGAVHTRGLDFACDIYIWAPLAGTCGVLLLSLVITLYCRRDQRLPPDAHKPPGGGSFRTPIQEEQADAHSTLAKIRVKFSRSADAPAYQQGQNQLYNELNLGRREEYDVLDKRRGRDPEMGGKPRRKNPQEGLYNELQKDKMAEAYSEIGMKGERRRGKGHDGLYQGLSTATKDTYDALHMQALPPR

SEQ ID NO: 657 - protein, 483 aa, synthetic construct
MALPVTALLLPLALLLHAARPQVQLVQSGAEVKKPGASVKVSCKASGGTFSRYDINWVRQAPGQGLEWVGIIDPTGASTSYAQKFQGRVTMTRDTSTSTVYMELSSLRSEDTAVYYCARDYSYGMDYYGMDVWGQGTLVTVSSGGGGSGGGGSGGGGSDIQMTQSPSSLSASVGDRVTITCQASQDISNYLNWYQQKPGKAPKLLIYDTSNLQTGVPSRFSGSGSGTDFTLTISSLQPEDFATYYLSTDLQTTAHFGQGTKVEIKTTTPAPRPPTPAPTIASQPLSLRPEACRPAAGGAVHTRGLDFACDIYIWAPLAGTCGVLLLSLVITLYCRRDQRLPPDAHKPPGGGSFRTPIQEEQADAHSTLAKIRVKFSRSADAPAYQQGQNQLYNELNLGRREEYDVLDKRRGRDPEMGGKPRRKNPQEGLYNELQKDKMAEAYSEIGMKGERRRGKGHDGLYQGLSTATKDTYDALHMQALPPR

SEQ ID NO: 658 - protein, 485 aa, synthetic construct
MALPVTALLLPLALLLHAARPQVQLVQSGAEVKKPGSSVKVSCKASGYTFTSYGISWVRQAPGQGLEWMGGIIPIFGTTNYAQKFQGRVTITADESTSTAYMELSSLRSEDTAVYYCARDHSGDGYFDLWGRGTLVTVSSGGGGSGGGGSGGGGSDIVMTQSPLSLPVTPGEPASISCRSSQSLLHSNGYNYLDWYLQKPGQSPQLLIYDASSLQSGVPDRFSGSGSGTDFTLKISRVEAEDVGVYYCMQGTHWPPTFGQGTKVEIKTTTPAPRPPTPAPTIASQPLSLRPEACRPAAGGAVHTRGLDFACDIYIWAPLAGTCGVLLLSLVITLYCRRDQRLPPDAHKPPGGGSFRTPIQEEQADAHSTLAKIRVKFSRSADAPAYQQGQNQLYNELNLGRREEYDVLDKRRGRDPEMGGKPRRKNPQEGLYNELQKDKMAEAYSEIGMKGERRRGKGHDGLYQGLSTATKDTYDALHMQALPPR

SEQ ID NO: 659 - protein, 479 aa, synthetic construct
MALPVTALLLPLALLLHAARPQVQLVQSGAEVKKPGASVKVSCKASGYTFTENEMHWVRQAPGQGLEWMGWINPNSGGTNYAQKFQGRVTMTRDTSTSTVYMELSSLRSEDTAVYYCAGSWGGYYFDYWGQGTLVTVSSGGGGSGGGGSGGGGSDIQMTQSPSSLSASVGDRVTITCRASQSVSRYLNWYQQKPGKAPKLLIYDASNLETGVPSRFSGSGSGTDFTLTISSLQPEDFATYYCQQADSFPVTFGQGTKLEIKTTTPAPRPPTPAPTIASQPLSLRPEACRPAAGGAVHTRGLDFACDIYIWAPLAGTCGVLLLSLVITLYCRRDQRLPPDAHKPPGGGSFRTPIQEEQADAHSTLAKIRVKFSRSADAPAYQQGQNQLYNELNLGRREEYDVLDKRRGRDPEMGGKPRRKNPQEGLYNELQKDKMAEAYSEIGMKGERRRGKGHDGLYQGLSTATKDTYDALHMQALPPR

SEQ ID NO: 660 - protein, 482 aa, synthetic construct
MALPVTALLLPLALLLHAARPQVQLVQSGAEVKKPGASVKVSCKASGYTFTNYYIYWVRQAPGQGLEWMGWINPNDGATNYAQKFQGRVTMTRDTSTSTVYMELSSLRSEDTAVYYCAREGNDYYYYFMDYWGQGTLVTVSSGGGGSGGGGSGGGGSDIQMTQSPSSLSASVGDRVTITCRASQGISNNLNWYQQKPGKAPKLLIYHASNLETGVPSRFSGSGSGTDFTLTISSLQPEDFATYYCQQSYDGPMTFGQGTKLEIKTTTPAPRPPTPAPTIASQPLSLRPEACRPAAGGAVHTRGLDFACDIYIWAPLAGTCGVLLLSLVITLYCRRDQRLPPDAHKPPGGGSFRTPIQEEQADAHSTLAKIRVKFSRSADAPAYQQGQNQLYNELNLGRREEYDVLDKRRGRDPEMGGKPRRKNPQEGLYNELQKDKMAEAYSEIGMKGERRRGKGHDGLYQGLSTATKDTYDALHMQALPPR

SEQ ID NO: 661 - protein, 488 aa, synthetic construct
MALPVTALLLPLALLLHAARPQVQLVQSGAEVKKPGSSVKVSCKASGGTFSSYAISWVRQAPGQGLEWMGGITPMFGTTDYAQKFQGRVTITADESTSTAYMELSSLRSEDTAVYYCARDERDGYATVAFDIWGQGTMVTVSSGGGGSGGGGSGGGGSDIVMTQSPLSLPVTPGEPASISCRSSQSLLHSNGYNYLDWYLQKPGQSPQLLIYDASNLETGVPDRFSGSGSGTDFTLKISRVEAEDVGVYYCMQGTHWPPTFGQGTKVEIKTTTPAPRPPTPAPTIASQPLSLRPEACRPAAGGAVHTRGLDFACDIYIWAPLAGTCGVLLLSLVITLYCRRDQRLPPDAHKPPGGGSFRTPIQEEQADAHSTLAKIRVKFSRSADAPAYQQGQNQLYNELNLGRREEYDVLDKRRGRDPEMGGKPRRKNPQEGLYNELQKDKMAEAYSEIGMKGERRRGKGHDGLYQGLSTATKDTYDALHMQALPPR

SEQ ID NO: 662 - protein, 483 aa, synthetic construct
MALPVTALLLPLALLLHAARPQVQLVQSGAEVKKPGASVKVSCKASGYTFTSYYMHWVRQAPGQGLEWMGIINPSDGGTSYADKFQGRVTMTRDTSTSTVYMELSSLRSEDTAVYYCARALAPLGWGDGMDVWGQGTTVTVSSGGGGSGGGGSGGGGSDIQMTQSPSSLSASVGDRVTITCQASQDISNYLNWYQQKPGKAPKLLIYDASNLETGVPSRFSGSGSGTDFTLTISSLQPEDFATYYCQQSYDGPITFGQGTRLEIKTTTPAPRPPTPAPTIASQPLSLRPEACRPAAGGAVHTRGLDFACDIYIWAPLAGTCGVLLLSLVITLYCRRDQRLPPDAHKPPGGGSFRTPIQEEQADAHSTLAKIRVKFSRSADAPAYQQGQNQLYNELNLGRREEYDVLDKRRGRDPEMGGKPRRKNPQEGLYNELQKDKMAEAYSEIGMKGERRRGKGHDGLYQGLSTATKDTYDALHMQALPPR

SEQ ID NO: 663 - protein, 480 aa, synthetic construct
MALPVTALLLPLALLLHAARPQVQLVQSGAEVKKPGSSVKVSCKASGYTFTSYYIHWVRQAPGQGLEWMGWMNPSSGVTNFAQKFQGRVTITADESTSTAYMELSSLRSEDTAVYYCARGSDQGDWSDPWGQGTLVTVSSGGGGSGGGGSGGGGSDIQMTQSPSSLSASVGDRVTITCRASQSISSYLNWYQQKPGKAPKLLIYDASNLETGVPSRFSGSGSGTDFTLTISSLQPEDFATYYCQQSYNTPPTFGGGTKVEIKTTTPAPRPPTPAPTIASQPLSLRPEACRPAAGGAVHTRGLDFACDIYIWAPLAGTCGVLLLSLVITLYCRRDQRLPPDAHKPPGGGSFRTPIQEEQADAHSTLAKIRVKFSRSADAPAYQQGQNQLYNELNLGRREEYDVLDKRRGRDPEMGGKPRRKNPQEGLYNELQKDKMAEAYSEIGMKGERRRGKGHDGLYQGLSTATKDTYDALHMQALPPR

SEQ ID NO: 664 - protein, 483 aa, synthetic construct
MALPVTALLLPLALLLHAARPQVQLVQSGAEVKKPGASVKVSCKASGYTFTDSYIHWVRQAPGQGLEWIGWMNPNTGDTGYAQKFQGRVTMTRDTSTSTVYMELSSLRSEDTAVYYCAKDDFGELAPATFDPWGQGTLVTVSSGGGGSGGGGSGGGGSDIQMTQSPSSLSASVGDRVTITCQASQDISNYLNWYQQKPGKAPKLLIYGASSLQSGVPSRFSGSGSGTDFTLTISSLQPEDFATYYCLQDAATPITFGQGTRLEIKTTTPAPRPPTPAPTIASQPLSLRPEACRPAAGGAVHTRGLDFACDIYIWAPLAGTCGVLLLSLVITLYCRRDQRLPPDAHKPPGGGSFRTPIQEEQADAHSTLAKIRVKFSRSADAPAYQQGQNQLYNELNLGRREEYDVLDKRRGRDPEMGGKPRRKNPQEGLYNELQKDKMAEAYSEIGMKGERRRGKGHDGLYQGLSTATKDTYDALHMQALPPR

SEQ ID NO: 665 - protein, 483 aa, synthetic construct
MALPVTALLLPLALLLHAARPQVQLVQSGAEVKKPGASVKVSCKASGYTFTSYDINWVRQAPGQGLEWMGVISPSGGGTSYAQKFQGRVTMTRDTSTSTVYMELSSLRSEDTAVYYCARYYGGNPEGWYFDLWGRGTLVTVSSGGGGSGGGGSGGGGSDIQMTQSPSSLSASVGDRVTITCRASQSIGNWLAWYQQKPGKAPKLLIYDASDLETGVPSRFSGSGSGTDFTLTISSLQPEDFATYYCQQSYTTPWTFGQGTKVEIKTTTPAPRPPTPAPTIASQPLSLRPEACRPAAGGAVHTRGLDFACDIYIWAPLAGTCGVLLLSLVITLYCRRDQRLPPDAHKPPGGGSFRTPIQEEQADAHSTLAKIRVKFSRSADAPAYQQGQNQLYNELNLGRREEYDVLDKRRGRDPEMGGKPRRKNPQEGLYNELQKDKMAEAYSEIGMKGERRRGKGHDGLYQGLSTATKDTYDALHMQALPPR

SEQ ID NO: 666 - protein, 498 aa, synthetic construct
MALPVTALLLPLALLLHAARPEVQLLESGGGLVQPGGSLRLSCAASGFVFDDYAIHWVRQAPGKGLEWVAAISYDGSNKYYADSVKGRFTISRDNSKNTLYLQMNSLRAEDTAVYYCARAPQYYGSGTDPLEVRYYYYGMDVWGQGTTVTVSSGGGGSGGGGSGGGGSDIVMTQSPLSLPVTPGEPASISCRSSQSLLHSNGYNYLDWYLQKPGQSPQLLIYEVSNRASGVPDRFSGSGSGTDFTLKISRVEAEDVGVYYCMKGLQTPLTFGPGTKVDIKTTTPAPRPPTPAPTIASQPLSLRPEACRPAAGGAVHTRGLDFACDIYIWAPLAGTCGVLLLSLVITLYCRRDQRLPPDAHKPPGGGSFRTPIQEEQADAHSTLAKIRVKFSRSADAPAYQQGQNQLYNELNLGRREEYDVLDKRRGRDPEMGGKPRRKNPQEGLYNELQKDKMAEAYSEIGMKGERRRGKGHDGLYQGLSTATKDTYDALHMQALPPR

SEQ ID NO: 667 - protein, 483 aa, synthetic construct
MALPVTALLLPLALLLHAARPQVQLVQSGAEVKKPGSSVKVSCKASGGTFRNYAISWVRQAPGQGLEWMGGIIPIFGTANYAQKFQGRVTITADESTSTAYMELSSLRSEDTAVYYCARDHSAGTHHDAFDIWGQGTMVTVSSGGGGSGGGGSGGGGSDIQMTQSPSSLSASVGDRVTITCRASQGISNYLAWYQQKPGKAPKLLIYAASSLQSGVPSRFSGSGSGTDFTLTISSLQPEDFATYYCQQSHSTPLTFGQGTKVEIKTTTPAPRPPTPAPTIASQPLSLRPEACRPAAGGAVHTRGLDFACDIYIWAPLAGTCGVLLLSLVITLYCRRDQRLPPDAHKPPGGGSFRTPIQEEQADAHSTLAKIRVKFSRSADAPAYQQGQNQLYNELNLGRREEYDVLDKRRGRDPEMGGKPRRKNPQEGLYNELQKDKMAEAYSEIGMKGERRRGKGHDGLYQGLSTATKDTYDALHMQALPPR

SEQ ID NO: 668 - protein, 478 aa, synthetic construct
MALPVTALLLPLALLLHAARPQVQLVQSGAEVKKPGASVKVSCKASGYTFTSYYIHWVRQAPGQGLEWMGWMNPNSGNAGYAQKFQGRVTMTRDTSTSTVYMELSSLRSEDTAVYYCAREYWGSFDYWGQGTLVTVSSGGGGSGGGGSGGGGSDIQMTQSPSSLSASVGDRVTITCRASQGISNNLNWYQQKPGKAPKLLIYDASNLETGVPSRFSGSGSGTDFTLTISSLQPEDFATYYCQQSYSTPYTFGQGTKVEIKTTTPAPRPPTPAPTIASQPLSLRPEACRPAAGGAVHTRGLDFACDIYIWAPLAGTCGVLLLSLVITLYCRRDQRLPPDAHKPPGGGSFRTPIQEEQADAHSTLAKIRVKFSRSADAPAYQQGQNQLYNELNLGRREEYDVLDKRRGRDPEMGGKPRRKNPQEGLYNELQKDKMAEAYSEIGMKGERRRGKGHDGLYQGLSTATKDTYDALHMQALPPR

SEQ ID NO: 669 - protein, 479 aa, synthetic construct
MALPVTALLLPLALLLHAARPQVQLVQSGAEVKKPGASVKVSCKASGYTFTGYYMHWVRQAPGQGLEWMGMIDPSDGSTIYAQKFQGRVTMTRDTSTSTVYMELSSLRSEDTAVYYCARERPLYASDLWGQGTLVTVSSGGGGSGGGGSGGGGSDIQMTQSPSSLSASVGDRVTITCRASQDIGNDLGWYQQKPGKAPKLLIYAASSLQSGVPSRFSGSGSGTDFTLTISSLQPEDFATYYCLQDYDYPLTFGQGTKVEIKTTTPAPRPPTPAPTIASQPLSLRPEACRPAAGGAVHTRGLDFACDIYIWAPLAGTCGVLLLSLVITLYCRRDQRLPPDAHKPPGGGSFRTPIQEEQADAHSTLAKIRVKFSRSADAPAYQQGQNQLYNELNLGRREEYDVLDKRRGRDPEMGGKPRRKNPQEGLYNELQKDKMAEAYSEIGMKGERRRGKGHDGLYQGLSTATKDTYDALHMQALPPR

SEQ ID NO: 670 - protein, 480 aa, synthetic construct
MALPVTALLLPLALLLHAARPQVQLVQSGAEVKKPGSSVKVSCKASGYTFTNYYMHWVRQAPGQGLEWMGWMNPDSGNTGYAQKFQGRVTITADESTSTAYMELSSLRSEDTAVYYCARSSSSWPDFDLWGRGTLVTVSSGGGGSGGGGSGGGGSDIQMTQSPSSLSASVGDRVTITCRASQSISSYLNWYQQKPGKAPKLLIYDASNLETGVPSRFSGSGSGTDFTLTISSLQPEDFATYYCQQSYNTPYSFGQGTKVEIKTTTPAPRPPTPAPTIASQPLSLRPEACRPAAGGAVHTRGLDFACDIYIWAPLAGTCGVLLLSLVITLYCRRDQRLPPDAHKPPGGGSFRTPIQEEQADAHSTLAKIRVKFSRSADAPAYQQGQNQLYNELNLGRREEYDVLDKRRGRDPEMGGKPRRKNPQEGLYNELQKDKMAEAYSEIGMKGERRRGKGHDGLYQGLSTATKDTYDALHMQALPPR

SEQ ID NO: 671 - protein, 481 aa, synthetic construct
MALPVTALLLPLALLLHAARPQVQLVQSGAEVKKPGASVKVSCKASGYTFTSYSMHWVRQAPGQGLEWVGIINPSSGSASYAQKFQGRVTMTRDTSTSTVYMELSSLRSEDTAVYYCARERGAYSSTFDYWGQGTLVTVSSGGGGSGGGGSGGGGSDIQMTQSPSSLSASVGDRVTITCRTSQSISSYLNWYQQKPGKAPKLLIYDASNLETGVPSRFSGSGSGTDFTLTISSLQPEDFATYYCLQDYSYPLTFGQGTKVEIKTTTPAPRPPTPAPTIASQPLSLRPEACRPAAGGAVHTRGLDFACDIYIWAPLAGTCGVLLLSLVITLYCRRDQRLPPDAHKPPGGGSFRTPIQEEQADAHSTLAKIRVKFSRSADAPAYQQGQNQLYNELNLGRREEYDVLDKRRGRDPEMGGKPRRKNPQEGLYNELQKDKMAEAYSEIGMKGERRRGKGHDGLYQGLSTATKDTYDALHMQALPPR

SEQ ID NO: 672 - protein, 481 aa, synthetic construct
MALPVTALLLPLALLLHAARPQVQLVQSGAEVKKPGASVKVSCKASGYTFTDYYMHWVRQAPGQGLEWMGVINPSDGTAHYAQRLQGRVTMTRDTSTSTVYMELSSLRSEDTAVYYCARDSGSYYADFDYWGQGTLVTVSSGGGGSGGGGSGGGGSDIQMTQSPSSLSASVGDRVTITCQASQDISNYLNWYQQKPGKAPKLLIYDASSLQSGVPSRFSGSGSGTDFTLTISSLQPEDFATYYCQQSYSTPPAFGQGTKVEIKTTTPAPRPPTPAPTIASQPLSLRPEACRPAAGGAVHTRGLDFACDIYIWAPLAGTCGVLLLSLVITLYCRRDQRLPPDAHKPPGGGSFRTPIQEEQADAHSTLAKIRVKFSRSADAPAYQQGQNQLYNELNLGRREEYDVLDKRRGRDPEMGGKPRRKNPQEGLYNELQKDKMAEAYSEIGMKGERRRGKGHDGLYQGLSTATKDTYDALHMQALPPR

SEQ ID NO: 673 - protein, 746 aa, synthetic construct
MALPVTALLLPLALLLHAARPQVQLVQSGAEVKKPGASVKVSCKASGYSFTSYYMHWVRQAPGQGLEWMGIINPSGGTTSYAQKFQGRVTMTRDTSTSTVYMELSSLRSEDTAVYYCARDNSPYSSSWWDYFDYWGQGTLVTVSSGGGGSGGGGSGGGGSDIQMTQSPSSLSASVGDRVTITCRASQDIRHYLAWYQQKPGKAPKLLIYDASSLQSGVPSRFSGSGSGTDFTLTISSLQPEDFATYYCQQTYDAPITFGQGTRLEIKGGGGSGGGGSGGGGSQVQLVQSGAEVKKPGASVKVSCKASGYSFTSYYMHWVRQAPGQGLEWMGIINPSGGTTSYAQKFQGRVTMTRDTSTSTVYMELSSLRSEDTAVYYCARDNSPYSSSWWDYFDYWGQGTLVTVSSGGGGSGGGGSGGGGSDIQMTQSPSSLSASVGDRVTITCRASQDIRHYLAWYQQKPGKAPKLLIYDASSLQSGVPSRFSGSGSGTDFTLTISSLQPEDFATYYCQQTYDAPITFGQGTRLEIKTTTPAPRPPTPAPTIASQPLSLRPEACRPAAGGAVHTRGLDFACDIYIWAPLAGTCGVLLLSLVITLYCRRDQRLPPDAHKPPGGGSFRTPIQEEQADAHSTLAKIRVKFSRSADAPAYQQGQNQLYNELNLGRREEYDVLDKRRGRDPEMGGKPRRKNPQEGLYNELQKDKMAEAYSEIGMKGERRRGKGHDGLYQGLSTATKDTYDALHMQALPPR

SEQ ID NO: 674 - protein, 746 aa, synthetic construct
MALPVTALLLPLALLLHAARPQVQLVQSGAEVKKPGSSVKVSCKASGYTFTSYGISWVRQAPGQGLEWMGGIIPIFGTTNYAQKFQGRVTITADESTSTAYMELSSLRSEDTAVYYCARDHSGDGYFDLWGRGTLVTVSSGGGGSGGGGSGGGGSDIVMTQSPLSLPVTPGEPASISCRSSQSLLHSNGYNYLDWYLQKPGQSPQLLIYDASSLQSGVPDRFSGSGSGTDFTLKISRVEAEDVGVYYCMQGTHWPPTFGQGTKVEIKGGGGSGGGGSGGGGSQVQLVQSGAEVKKPGSSVKVSCKASGYTFTSYGISWVRQAPGQGLEWMGGIIPIFGTTNYAQKFQGRVTITADESTSTAYMELSSLRSEDTAVYYCARDHSGDGYFDLWGRGTLVTVSSGGGGSGGGGSGGGGSDIVMTQSPLSLPVTPGEPASISCRSSQSLLHSNGYNYLDWYLQKPGQSPQLLIYDASSLQSGVPDRFSGSGSGTDFTLKISRVEAEDVGVYYCMQGTHWPPTFGQGTKVEIKTTTPAPRPPTPAPTIASQPLSLRPEACRPAAGGAVHTRGLDFACDIYIWAPLAGTCGVLLLSLVITLYCRRDQRLPPDAHKPPGGGSFRTPIQEEQADAHSTLAKIRVKFSRSADAPAYQQGQNQLYNELNLGRREEYDVLDKRRGRDPEMGGKPRRKNPQEGLYNELQKDKMAEAYSEIGMKGERRRGKGHDGLYQGLSTATKDTYDALHMQALPPR

SEQ ID NO: 675 - protein, 734 aa, synthetic construct
MALPVTALLLPLALLLHAARPQVQLVQSGAEVKKPGASVKVSCKASGYTFTENEMHWVRQAPGQGLEWMGWINPNSGGTNYAQKFQGRVTMTRDTSTSTVYMELSSLRSEDTAVYYCAGSWGGYYFDYWGQGTLVTVSSGGGGSGGGGSGGGGSDIQMTQSPSSLSASVGDRVTITCRASQSVSRYLNWYQQKPGKAPKLLIYDASNLETGVPSRFSGSGSGTDFTLTISSLQPEDFATYYCQQADSFPVTFGQGTKLEIKGGGGSGGGGSGGGGSQVQLVQSGAEVKKPGASVKVSCKASGYTFTENEMHWVRQAPGQGLEWMGWINPNSGGTNYAQKFQGRVTMTRDTSTSTVYMELSSLRSEDTAVYYCAGSWGGYYFDYWGQGTLVTVSSGGGGSGGGGSGGGGSDIQMTQSPSSLSASVGDRVTITCRASQSVSRYLNWYQQKPGKAPKLLIYDASNLETGVPSRFSGSGSGTDFTLTISSLQPEDFATYYCQQADSFPVTFGQGTKLEIKTTTPAPRPPTPAPTIASQPLSLRPEACRPAAGGAVHTRGLDFACDIYIWAPLAGTCGVLLLSLVITLYCRRDQRLPPDAHKPPGGGSFRTPIQEEQADAHSTLAKIRVKFSRSADAPAYQQGQNQLYNELNLGRREEYDVLDKRRGRDPEMGGKPRRKNPQEGLYNELQKDKMAEAYSEIGMKGERRRGKGHDGLYQGLSTATKDTYDALHMQALPPR

SEQ ID NO: 676 - protein, 749 aa, synthetic construct
MALPVTALLLPLALLLHAARPQVQLVQSGAEVKKPGASVKVSCKASGYSFTSYYMHWVRQAPGQGLEWMGIINPSGGTTSYAQKFQGRVTMTRDTSTSTVYMELSSLRSEDTAVYYCARDNSPYSSSWWDYFDYWGQGTLVTVSSGGGGSGGGGSGGGGSDIQMTQSPSSLSASVGDRVTITCRASQDIRHYLAWYQQKPGKAPKLLIYDASSLQSGVPSRFSGSGSGTDFTLTISSLQPEDFATYYCQQTYDAPITFGQGTRLEIKGGGGSGGGGSGGGGSQVQLVQSGAEVKKPGSSVKVSCKASGGTFSSYAISWVRQAPGQGLEWMGGITPMFGTTDYAQKFQGRVTITADESTSTAYMELSSLRSEDTAVYYCARDERDGYATVAFDIWGQGTMVTVSSGGGGSGGGGSGGGGSDIVMTQSPLSLPVTPGEPASISCRSSQSLLHSNGYNYLDWYLQKPGQSPQLLIYDASNLETGVPDRFSGSGSGTDFTLKISRVEAEDVGVYYCMQGTHWPPTFGQGTKVEIKTTTPAPRPPTPAPTIASQPLSLRPEACRPAAGGAVHTRGLDFACDIYIWAPLAGTCGVLLLSLVITLYCRRDQRLPPDAHKPPGGGSFRTPIQEEQADAHSTLAKIRVKFSRSADAPAYQQGQNQLYNELNLGRREEYDVLDKRRGRDPEMGGKPRRKNPQEGLYNELQKDKMAEAYSEIGMKGERRRGKGHDGLYQGLSTATKDTYDALHMQALPPR

SEQ ID NO: 677 - protein, 744 aa, synthetic construct
MALPVTALLLPLALLLHAARPQVQLVQSGAEVKKPGASVKVSCKASGYSFTSYYMHWVRQAPGQGLEWMGIINPSGGTTSYAQKFQGRVTMTRDTSTSTVYMELSSLRSEDTAVYYCARDNSPYSSSWWDYFDYWGQGTLVTVSSGGGGSGGGGSGGGGSDIQMTQSPSSLSASVGDRVTITCRASQDIRHYLAWYQQKPGKAPKLLIYDASSLQSGVPSRFSGSGSGTDFTLTISSLQPEDFATYYCQQTYDAPITFGQGTRLEIKGGGGSGGGGSGGGGSQVQLVQSGAEVKKPGASVKVSCKASGYTFTSYYMHWVRQAPGQGLEWMGIINPSDGGTSYADKFQGRVTMTRDTSTSTVYMELSSLRSEDTAVYYCARALAPLGWGDGMDVWGQGTTVTVSSGGGGSGGGGSGGGGSDIQMTQSPSSLSASVGDRVTITCQASQDISNYLNWYQQKPGKAPKLLIYDASNLETGVPSRFSGSGSGTDFTLTISSLQPEDFATYYCQQSYDGPITFGQGTRLEIKTTTPAPRPPTPAPTIASQPLSLRPEACRPAAGGAVHTRGLDFACDIYIWAPLAGTCGVLLLSLVITLYCRRDQRLPPDAHKPPGGGSFRTPIQEEQADAHSTLAKIRVKFSRSADAPAYQQGQNQLYNELNLGRREEYDVLDKRRGRDPEMGGKPRRKNPQEGLYNELQKDKMAEAYSEIGMKGERRRGKGHDGLYQGLSTATKDTYDALHMQALPPR

SEQ ID NO: 678 - protein, 749 aa, synthetic construct
MALPVTALLLPLALLLHAARPQVQLVQSGAEVKKPGSSVKVSCKASGYTFTSYGISWVRQAPGQGLEWMGGIIPIFGTTNYAQKFQGRVTITADESTSTAYMELSSLRSEDTAVYYCARDHSGDGYFDLWGRGTLVTVSSGGGGSGGGGSGGGGSDIVMTQSPLSLPVTPGEPASISCRSSQSLLHSNGYNYLDWYLQKPGQSPQLLIYDASSLQSGVPDRFSGSGSGTDFTLKISRVEAEDVGVYYCMQGTHWPPTFGQGTKVEIKGGGGSGGGGSGGGGSQVQLVQSGAEVKKPGSSVKVSCKASGGTFSSYAISWVRQAPGQGLEWMGGITPMFGTTDYAQKFQGRVTITADESTSTAYMELSSLRSEDTAVYYCARDERDGYATVAFDIWGQGTMVTVSSGGGGSGGGGSGGGGSDIVMTQSPLSLPVTPGEPASISCRSSQSLLHSNGYNYLDWYLQKPGQSPQLLIYDASNLETGVPDRFSGSGSGTDFTLKISRVEAEDVGVYYCMQGTHWPPTFGQGTKVEIKTTTPAPRPPTPAPTIASQPLSLRPEACRPAAGGAVHTRGLDFACDIYIWAPLAGTCGVLLLSLVITLYCRRDQRLPPDAHKPPGGGSFRTPIQEEQADAHSTLAKIRVKFSRSADAPAYQQGQNQLYNELNLGRREEYDVLDKRRGRDPEMGGKPRRKNPQEGLYNELQKDKMAEAYSEIGMKGERRRGKGHDGLYQGLSTATKDTYDALHMQALPPR

SEQ ID NO: 679 - protein, 744 aa, synthetic construct
MALPVTALLLPLALLLHAARPQVQLVQSGAEVKKPGSSVKVSCKASGYTFTSYGISWVRQAPGQGLEWMGGIIPIFGTTNYAQKFQGRVTITADESTSTAYMELSSLRSEDTAVYYCARDHSGDGYFDLWGRGTLVTVSSGGGGSGGGGSGGGGSDIVMTQSPLSLPVTPGEPASISCRSSQSLLHSNGYNYLDWYLQKPGQSPQLLIYDASSLQSGVPDRFSGSGSGTDFTLKISRVEAEDVGVYYCMQGTHWPPTFGQGTKVEIKGGGGSGGGGSGGGGSQVQLVQSGAEVKKPGASVKVSCKASGYTFTSYYMHWVRQAPGQGLEWMGIINPSDGGTSYADKFQGRVTMTRDTSTSTVYMELSSLRSEDTAVYYCARALAPLGWGDGMDVWGQGTTVTVSSGGGGSGGGGSGGGGSDIQMTQSPSSLSASVGDRVTITCQASQDISNYLNWYQQKPGKAPKLLIYDASNLETGVPSRFSGSGSGTDFTLTISSLQPEDFATYYCQQSYDGPITFGQGTRLEIKTTTPAPRPPTPAPTIASQPLSLRPEACRPAAGGAVHTRGLDFACDIYIWAPLAGTCGVLLLSLVITLYCRRDQRLPPDAHKPPGGGSFRTPIQEEQADAHSTLAKIRVKFSRSADAPAYQQGQNQLYNELNLGRREEYDVLDKRRGRDPEMGGKPRRKNPQEGLYNELQKDKMAEAYSEIGMKGERRRGKGHDGLYQGLSTATKDTYDALHMQALPPR

SEQ ID NO: 680 - protein, 743 aa, synthetic construct
MALPVTALLLPLALLLHAARPQVQLVQSGAEVKKPGASVKVSCKASGYTFTENEMHWVRQAPGQGLEWMGWINPNSGGTNYAQKFQGRVTMTRDTSTSTVYMELSSLRSEDTAVYYCAGSWGGYYFDYWGQGTLVTVSSGGGGSGGGGSGGGGSDIQMTQSPSSLSASVGDRVTITCRASQSVSRYLNWYQQKPGKAPKLLIYDASNLETGVPSRFSGSGSGTDFTLTISSLQPEDFATYYCQQADSFPVTFGQGTKLEIKGGGGSGGGGSGGGGSQVQLVQSGAEVKKPGSSVKVSCKASGGTFSSYAISWVRQAPGQGLEWMGGITPMFGTTDYAQKFQGRVTITADESTSTAYMELSSLRSEDTAVYYCARDERDGYATVAFDIWGQGTMVTVSSGGGGSGGGGSGGGGSDIVMTQSPLSLPVTPGEPASISCRSSQSLLHSNGYNYLDWYLQKPGQSPQLLIYDASNLETGVPDRFSGSGSGTDFTLKISRVEAEDVGVYYCMQGTHWPPTFGQGTKVEIKTTTPAPRPPTPAPTIASQPLSLRPEACRPAAGGAVHTRGLDFACDIYIWAPLAGTCGVLLLSLVITLYCRRDQRLPPDAHKPPGGGSFRTPIQEEQADAHSTLAKIRVKFSRSADAPAYQQGQNQLYNELNLGRREEYDVLDKRRGRDPEMGGKPRRKNPQEGLYNELQKDKMAEAYSEIGMKGERRRGKGHDGLYQGLSTATKDTYDALHMQALPPR

SEQ ID NO: 681 - protein, 738 aa, synthetic construct
MALPVTALLLPLALLLHAARPQVQLVQSGAEVKKPGASVKVSCKASGYTFTENEMHWVRQAPGQGLEWMGWINPNSGGTNYAQKFQGRVTMTRDTSTSTVYMELSSLRSEDTAVYYCAGSWGGYYFDYWGQGTLVTVSSGGGGSGGGGSGGGGSDIQMTQSPSSLSASVGDRVTITCRASQSVSRYLNWYQQKPGKAPKLLIYDASNLETGVPSRFSGSGSGTDFTLTISSLQPEDFATYYCQQADSFPVTFGQGTKLEIKGGGGSGGGGSGGGGSQVQLVQSGAEVKKPGASVKVSCKASGYTFTSYYMHWVRQAPGQGLEWMGIINPSDGGTSYADKFQGRVTMTRDTSTSTVYMELSSLRSEDTAVYYCARALAPLGWGDGMDVWGQGTTVTVSSGGGGSGGGGSGGGGSDIQMTQSPSSLSASVGDRVTITCQASQDISNYLNWYQQKPGKAPKLLIYDASNLETGVPSRFSGSGSGTDFTLTISSLQPEDFATYYCQQSYDGPITFGQGTRLEIKTTTPAPRPPTPAPTIASQPLSLRPEACRPAAGGAVHTRGLDFACDIYIWAPLAGTCGVLLLSLVITLYCRRDQRLPPDAHKPPGGGSFRTPIQEEQADAHSTLAKIRVKFSRSADAPAYQQGQNQLYNELNLGRREEYDVLDKRRGRDPEMGGKPRRKNPQEGLYNELQKDKMAEAYSEIGMKGERRRGKGHDGLYQGLSTATKDTYDALHMQALPPR

SEQ ID NO: 682 - RNA, 20 nt, synthetic construct
  source 1..20: mol_type = other RNA
tttttcttaccgaatgctgc

SEQ ID NO: 683 - RNA, 20 nt, synthetic construct
  source 1..20: mol_type = other RNA
atctaatatccagcagcatt

SEQ ID NO: 684 - RNA, 20 nt, synthetic construct
  source 1..20: mol_type = other RNA
ctctgaaataaaggtaaaaa

SEQ ID NO: 685 - RNA, 20 nt, synthetic construct
  source 1..20: mol_type = other RNA
atcaagcttctctgaaataa

SEQ ID NO: 686 - RNA, 20 nt, synthetic construct
  source 1..20: mol_type = other RNA
taactttttcagctttgaaa

SEQ ID NO: 687 - RNA, 20 nt, synthetic construct
  source 1..20: mol_type = other RNA
aaggtaatttgaattattca

SEQ ID NO: 688 - RNA, 20 nt, synthetic construct
  source 1..20: mol_type = other RNA
taggaaagccatcaccaagt

SEQ ID NO: 689 - RNA, 20 nt, synthetic construct
  source 1..20: mol_type = other RNA
tgccgctctgactcgctgca

SEQ ID NO: 690 - RNA, 20 nt, synthetic construct
  source 1..20: mol_type = other RNA
tggtgatggctttcctagag

SEQ ID NO: 691 - RNA, 20 nt, synthetic construct
  source 1..20: mol_type = other RNA
ctggaggcccgacttggtga

SEQ ID NO: 692 - RNA, 20 nt, synthetic construct
  source 1..20: mol_type = other RNA
aggaaagccatcaccaagtc

SEQ ID NO: 693 - RNA, 20 nt, synthetic construct
  source 1..20: mol_type = other RNA
caggtgctggaggcccgact

SEQ ID NO: 694 - RNA, 20 nt, synthetic construct
  source 1..20: mol_type = other RNA
gagggggggccaggtgctgg

SEQ ID NO: 695 - RNA, 20 nt, synthetic construct
  source 1..20: mol_type = other RNA
caagtcgggcctccagcacc

SEQ ID NO: 696 - RNA, 20 nt, synthetic construct
  source 1..20: mol_type = other RNA
gcggagggggggccaggtgc

SEQ ID NO: 697 - RNA, 20 nt, synthetic construct
  source 1..20: mol_type = other RNA
gggtgggcggagggggggcc

SEQ ID NO: 698 - RNA, 20 nt, synthetic construct
  source 1..20: mol_type = other RNA
cccaggggtgggcggagggg

SEQ ID NO: 699 - RNA, 20 nt, synthetic construct
  source 1..20: mol_type = other RNA
gccccaggggtgggcggagg

SEQ ID NO: 700 - RNA, 20 nt, synthetic construct
  source 1..20: mol_type = other RNA
ggccccaggggtgggcggag

SEQ ID NO: 701 - RNA, 20 nt, synthetic construct
  source 1..20: mol_type = other RNA
gggccccaggggtgggcgga

SEQ ID NO: 702 - RNA, 20 nt, synthetic construct
  source 1..20: mol_type = other RNA
ggggccccaggggtgggcgg

SEQ ID NO: 703 - RNA, 20 nt, synthetic construct
  source 1..20: mol_type = other RNA
cacggggccccaggggtggg

SEQ ID NO: 704 - RNA, 20 nt, synthetic construct
  source 1..20: mol_type = other RNA
gccccccctccgcccacccc

SEQ ID NO: 705 - RNA, 20 nt, synthetic construct
  source 1..20: mol_type = other RNA
ccccccctccgcccacccct

SEQ ID NO: 706 - RNA, 20 nt, synthetic construct
  source 1..20: mol_type = other RNA
ctgcacggggccccaggggt

SEQ ID NO: 707 - RNA, 20 nt, synthetic construct
  source 1..20: mol_type = other RNA
cccccctccgcccacccctg

SEQ ID NO: 708 - RNA, 20 nt, synthetic construct
  source 1..20: mol_type = other RNA
gctgcacggggccccagggg

SEQ ID NO: 709 - RNA, 20 nt, synthetic construct
  source 1..20: mol_type = other RNA
ctcgctgcacggggccccag

SEQ ID NO: 710 - RNA, 20 nt, synthetic construct
  source 1..20: mol_type = other RNA
actcgctgcacggggcccca

SEQ ID NO: 711 - RNA, 20 nt, synthetic construct
  source 1..20: mol_type = other RNA
gactcgctgcacggggcccc

SEQ ID NO: 712 - RNA, 20 nt, synthetic construct
  source 1..20: mol_type = other RNA
ccgctctgactcgctgcacg

SEQ ID NO: 713 - RNA, 20 nt, synthetic construct
  source 1..20: mol_type = other RNA
gccgctctgactcgctgcac

SEQ ID NO: 714 - RNA, 20 nt, synthetic construct
  source 1..20: mol_type = other RNA
ccccgtgcagcgagtcagag

SEQ ID NO: 715 - RNA, 20 nt, synthetic construct
  source 1..20: mol_type = other RNA
gcgagtcagagcggcagatc

SEQ ID NO: 716 - RNA, 20 nt, synthetic construct
  source 1..20: mol_type = other RNA
cgctccagtccactgtactc

SEQ ID NO: 717 - RNA, 20 nt, synthetic construct
  source 1..20: mol_type = other RNA
gcggcagatccggagtacag

SEQ ID NO: 718 - RNA, 20 nt, synthetic construct
  source 1..20: mol_type = other RNA
agatccggagtacagtggac

SEQ ID NO: 719 - RNA, 20 nt, synthetic construct
  source 1..20: mol_type = other RNA
tctgggacccaggggtgttc

SEQ ID NO: 720 - RNA, 20 nt, synthetic construct
  source 1..20: mol_type = other RNA
cgtgagtgcctgaacacccc

SEQ ID NO: 721 - RNA, 20 nt, synthetic construct
  source 1..20: mol_type = other RNA
gtgagtgcctgaacacccct

SEQ ID NO: 722 - RNA, 20 nt, synthetic construct
  source 1..20: mol_type = other RNA
cccctgggtcccagaccctc

SEQ ID NO: 723 - RNA, 20 nt, synthetic construct
  source 1..20: mol_type = other RNA
ccccaggggtgggcggaggg

SEQ ID NO: 724 - RNA, 20 nt, synthetic construct
  source 1..20: mol_type = other RNA
ctttcttcctttaggagaca

SEQ ID NO: 725 - RNA, 20 nt, synthetic construct
  source 1..20: mol_type = other RNA
cttcctttaggagacaagga

SEQ ID NO: 726 - RNA, 20 nt, synthetic construct
  source 1..20: mol_type = other RNA
aggagacaaggacggcagca

SEQ ID NO: 727 - RNA, 20 nt, synthetic construct
  source 1..20: mol_type = other RNA
cggcagcaaggtgacaacag

SEQ ID NO: 728 - RNA, 20 nt, synthetic construct
  source 1..20: mol_type = other RNA
cagcaaggtgacaacagtgg

SEQ ID NO: 729 - RNA, 20 nt, synthetic construct
  source 1..20: mol_type = other RNA
acaacagtggtggcaactcc

SEQ ID NO: 730 - RNA, 20 nt, synthetic construct
  source 1..20: mol_type = other RNA
caacagtggtggcaactcct

SEQ ID NO: 731 - RNA, 20 nt, synthetic construct
  source 1..20: mol_type = other RNA
agtggtggcaactcctgggc

SEQ ID NO: 732 - RNA, 20 nt, synthetic construct
  source 1..20: mol_type = other RNA
gtggtggcaactcctgggca

SEQ ID NO: 733 - RNA, 20 nt, synthetic construct
  source 1..20: mol_type = other RNA
ggcctgtctggaccctgccc

SEQ ID NO: 734 - RNA, 20 nt, synthetic construct
  source 1..20: mol_type = other RNA
tctgtatagctgacttcttg

SEQ ID NO: 735 - RNA, 20 nt, synthetic construct
  source 1..20: mol_type = other RNA
tatacagacactaaagtgat

SEQ ID NO: 736 - RNA, 20 nt, synthetic construct
  source 1..20: mol_type = other RNA
gacactaaagtgattggaaa

SEQ ID NO: 737 - RNA, 20 nt, synthetic construct
  source 1..20: mol_type = other RNA
gtgattggaaatggatcatt

SEQ ID NO: 738 - RNA, 20 nt, synthetic construct
  source 1..20: mol_type = other RNA
tggaaatggatcatttggtg

SEQ ID NO: 739 - RNA, 20 nt, synthetic construct
  source 1..20: mol_type = other RNA
actttgtgattcaggagaac

SEQ ID NO: 740 - RNA, 20 nt, synthetic construct
  source 1..20: mol_type = other RNA
gtcctgcaatactttcttga

SEQ ID NO: 741 - RNA, 20 nt, synthetic construct
  source 1..20: mol_type = other RNA
cgccatcaagaaagtattgc

SEQ ID NO: 742 - RNA, 20 nt, synthetic construct
  source 1..20: mol_type = other RNA
cttgtctcctaaaggaagaa

SEQ ID NO: 743 - RNA, 20 nt, synthetic construct
  source 1..20: mol_type = other RNA
aaaatttcctttcttccttt

SEQ ID NO: 744 - RNA, 20 nt, synthetic construct
  source 1..20: mol_type = other RNA
ctgccgtccttgtctcctaa

SEQ ID NO: 745 - RNA, 20 nt, synthetic construct
  source 1..20: mol_type = other RNA
ctcctgggcagggtccagac

SEQ ID NO: 746 - RNA, 20 nt, synthetic construct
  source 1..20: mol_type = other RNA
ctgacttcttgtggcctgtc

SEQ ID NO: 747 - RNA, 20 nt, synthetic construct
  source 1..20: mol_type = other RNA
ttctcctgaatcacaaagtt

SEQ ID NO: 748 - RNA, 20 nt, synthetic construct
  source 1..20: mol_type = other RNA
caagccaaactttgtgattc

SEQ ID NO: 749 - RNA, 20 nt, synthetic construct
  source 1..20: mol_type = other RNA
attgcaggacaagagattta

SEQ ID NO: 750 - RNA, 20 nt, synthetic construct
  source 1..20: mol_type = other RNA
aaccataacaaaaccatcca

SEQ ID NO: 751 - RNA, 20 nt, synthetic construct
  source 1..20: mol_type = other RNA
agccttggatggttttgtta

SEQ ID NO: 752 - RNA, 20 nt, synthetic construct
  source 1..20: mol_type = other RNA
gttatggttctcacagatga

SEQ ID NO: 753 - RNA, 20 nt, synthetic construct
  source 1..20: mol_type = other RNA
tgataatgtgaacaaataca

SEQ ID NO: 754 - RNA, 20 nt, synthetic construct
  source 1..20: mol_type = other RNA
gataatgtgaacaaatacat

SEQ ID NO: 755 - RNA, 20 nt, synthetic construct
  source 1..20: mol_type = other RNA
caaatacatgggattaactc

SEQ ID NO: 756 - RNA, 20 nt, synthetic construct
  source 1..20: mol_type = other RNA
atatccaaatcacctaaaaa

SEQ ID NO: 757 - RNA, 20 nt, synthetic construct
  source 1..20: mol_type = other RNA
aatatccaaatcacctaaaa

SEQ ID NO: 758 - RNA, 20 nt, synthetic construct
  source 1..20: mol_type = other RNA
tgtgccctttttaggtgatt

SEQ ID NO: 759 - RNA, 20 nt, synthetic construct
  source 1..20: mol_type = other RNA
ttgcttttatttgaaagcct

SEQ ID NO: 760 - RNA, 20 nt, synthetic construct
  source 1..20: mol_type = other RNA
ttttatttgaaagccttgga

SEQ ID NO: 761 - RNA, 20 nt, synthetic construct
  source 1..20: mol_type = other RNA
acctcagcccctggctggag

SEQ ID NO: 762 - RNA, 20 nt, synthetic construct
  source 1..20: mol_type = other RNA
ctagtgaagcctctccagcc

SEQ ID NO: 763 - RNA, 20 nt, synthetic construct
  source 1..20: mol_type = other RNA
accaccgggacctcagcccc

SEQ ID NO: 764 - RNA, 20 nt, synthetic construct
  source 1..20: mol_type = other RNA
gggctgaggtcccggtggtg

SEQ ID NO: 765 - RNA, 20 nt, synthetic construct
  source 1..20: mol_type = other RNA
ccctcctgggcccacaccac

SEQ ID NO: 766 - RNA, 20 nt, synthetic construct
  source 1..20: mol_type = other RNA
ggctgaggtcccggtggtgt

SEQ ID NO: 767 - RNA, 20 nt, synthetic construct
  source 1..20: mol_type = other RNA
ccggtggtgtgggcccagga

SEQ ID NO: 768 - RNA, 20 nt, synthetic construct
  source 1..20: mol_type = other RNA
ctgggcaggagccccctcct

SEQ ID NO: 769 - RNA, 20 nt, synthetic construct
  source 1..20: mol_type = other RNA
agggggattgtggggctgca

SEQ ID NO: 770 - RNA, 20 nt, synthetic construct
  source 1..20: mol_type = other RNA
gatcctggagggggattgtg

SEQ ID NO: 771 - RNA, 20 nt, synthetic construct
  source 1..20: mol_type = other RNA
cagccccacaatccccctcc

SEQ ID NO: 772 - RNA, 20 nt, synthetic construct
  source 1..20: mol_type = other RNA
agaaggctgagatcctggag

SEQ ID NO: 773 - RNA, 20 nt, synthetic construct
  source 1..20: mol_type = other RNA
cagaaggctgagatcctgga

SEQ ID NO: 774 - RNA, 20 nt, synthetic construct
  source 1..20: mol_type = other RNA
gcagaaggctgagatcctgg

SEQ ID NO: 775 - RNA, 20 nt, synthetic construct
  source 1..20: mol_type = other RNA
ttcgcagaaggctgagatcc

SEQ ID NO: 776 - RNA, 20 nt, synthetic construct
  source 1..20: mol_type = other RNA
tgacccctgctcttcgcaga

SEQ ID NO: 777 - RNA, 20 nt, synthetic construct
  source 1..20: mol_type = other RNA
tcagccttctgcgaagagca

SEQ ID NO: 778 - RNA, 20 nt, synthetic construct
  source 1..20: mol_type = other RNA
cagccttctgcgaagagcag

SEQ ID NO: 779 - RNA, 20 nt, synthetic construct
  source 1..20: mol_type = other RNA
tgcgaagagcaggggtcact

SEQ ID NO: 780 - RNA, 20 nt, synthetic construct
  source 1..20: mol_type = other RNA
cttggcagcatcagccagac

SEQ ID NO: 781 - RNA, 20 nt, synthetic construct
  source 1..20: mol_type = other RNA
gtttggggtgcatacctgtc

SEQ ID NO: 782 - RNA, 20 nt, synthetic construct
  source 1..20: mol_type = other RNA
tcactaggtgagcaaaagag

SEQ ID NO: 783 - RNA, 20 nt, synthetic construct
  source 1..20: mol_type = other RNA
ctggctggagaggcttcact

SEQ ID NO: 784 - RNA, 20 nt, synthetic construct
  source 1..20: mol_type = other RNA
tagtgaagcctctccagcca

SEQ ID NO: 785 - RNA, 20 nt, synthetic construct
  source 1..20: mol_type = other RNA
agtgaagcctctccagccag

SEQ ID NO: 786 - RNA, 20 nt, synthetic construct
  source 1..20: mol_type = other RNA
ccgggacctcagcccctggc

SEQ ID NO: 787 - RNA, 20 nt, synthetic construct
  source 1..20: mol_type = other RNA
gcctctccagccaggggctg

SEQ ID NO: 788 - RNA, 20 nt, synthetic construct
  source 1..20: mol_type = other RNA
ccagccaggggctgaggtcc

SEQ ID NO: 789 - RNA, 20 nt, synthetic construct
  source 1..20: mol_type = other RNA
gccaggggctgaggtcccgg

SEQ ID NO: 790 - RNA, 20 nt, synthetic construct
  source 1..20: mol_type = other RNA
cgctctgtattccacttctg

SEQ ID NO: 791 - RNA, 20 nt, synthetic construct
  source 1..20: mol_type = other RNA
ctatgcagggtcctcagaag

SEQ ID NO: 792 - RNA, 20 nt, synthetic construct
  source 1..20: mol_type = other RNA
ctcagaagtggaatacagag

SEQ ID NO: 793 - RNA, 20 nt, synthetic construct
  source 1..20: mol_type = other RNA
agaagtggaatacagagcgg

SEQ ID NO: 794 - RNA, 20 nt, synthetic construct
  source 1..20: mol_type = other RNA
gtggaatacagagcggaggt

SEQ ID NO: 795 - RNA, 20 nt, synthetic construct
  source 1..20: mol_type = other RNA
ggtgtagaagcagggcagat

SEQ ID NO: 796 - RNA, 20 nt, synthetic construct
  source 1..20: mol_type = other RNA
gcggctggggtgtagaagca

SEQ ID NO: 797 - RNA, 20 nt, synthetic construct
  source 1..20: mol_type = other RNA
gaggttccctggggcggctg

SEQ ID NO: 798 - RNA, 20 nt, synthetic construct
  source 1..20: mol_type = other RNA
tctacaccccagccgcccca

SEQ ID NO: 799 - RNA, 20 nt, synthetic construct
  source 1..20: mol_type = other RNA
gggcacgaggttccctgggg

SEQ ID NO: 800 - RNA, 20 nt, synthetic construct
  source 1..20: mol_type = other RNA
gacgggcacgaggttccctg

SEQ ID NO: 801 - RNA, 20 nt, synthetic construct
  source 1..20: mol_type = other RNA
agacgggcacgaggttccct

SEQ ID NO: 802 - RNA, 20 nt, synthetic construct
  source 1..20: mol_type = other RNA
tgccccagcagacgggcacg

SEQ ID NO: 803 - RNA, 20 nt, synthetic construct
  source 1..20: mol_type = other RNA
gctcctttgccccagcagac

SEQ ID NO: 804 - RNA, 20 nt, synthetic construct
  source 1..20: mol_type = other RNA
ggctcctttgccccagcaga

SEQ ID NO: 805 - RNA, 20 nt, synthetic construct
  source 1..20: mol_type = other RNA
aacctcgtgcccgtctgctg

SEQ ID NO: 806 - RNA, 20 nt, synthetic construct
  source 1..20: mol_type = other RNA
acgttgccacattcaaacac

SEQ ID NO: 807 - RNA, 20 nt, synthetic construct
  source 1..20: mol_type = other RNA
gcctgtcctgtgtttgaatg

SEQ ID NO: 808 - RNA, 20 nt, synthetic construct
  source 1..20: mol_type = other RNA
tgtgtttgaatgtggcaacg

SEQ ID NO: 809 - RNA, 20 nt, synthetic construct
  source 1..20: mol_type = other RNA
aatgtggcaacgtggtgctc

SEQ ID NO: 810 - RNA, 20 nt, synthetic construct
  source 1..20: mol_type = other RNA
tggtgctcaggactgatgaa

SEQ ID NO: 811 - RNA, 20 nt, synthetic construct
  source 1..20: mol_type = other RNA
attattggacatccagatac

SEQ ID NO: 812 - RNA, 20 nt, synthetic construct
  source 1..20: mol_type = other RNA
atccagatactggctaaatg

SEQ ID NO: 813 - RNA, 20 nt, synthetic construct
  source 1..20: mol_type = other RNA
ctaaatggggatttccgcaa

SEQ ID NO: 814 - RNA, 20 nt, synthetic construct
  source 1..20: mol_type = other RNA
tcagggacacatctcctttg

SEQ ID NO: 815 - RNA, 20 nt, synthetic construct
  source 1..20: mol_type = other RNA
agtcacattctctatggtca

SEQ ID NO: 816 - RNA, 20 nt, synthetic construct
  source 1..20: mol_type = other RNA
gagtcacattctctatggtc

SEQ ID NO: 817 - RNA, 20 nt, synthetic construct
  source 1..20: mol_type = other RNA
tgctagagtcacattctcta

SEQ ID NO: 818 - RNA, 20 nt, synthetic construct
  source 1..20: mol_type = other RNA
aatgtgactctagcagacag

SEQ ID NO: 819 - RNA, 20 nt, synthetic construct
  source 1..20: mol_type = other RNA
atgtgactctagcagacagt

SEQ ID NO: 820 - RNA, 20 nt, synthetic construct
  source 1..20: mol_type = other RNA
acagtgggatctactgctgc

SEQ ID NO: 821 - RNA, 20 nt, synthetic construct
  source 1..20: mol_type = other RNA
ttatgcctgggatttggatc

SEQ ID NO: 822 - RNA, 20 nt, synthetic construct
  source 1..20: mol_type = other RNA
tgctgccggatccaaatccc

SEQ ID NO: 823 - RNA, 20 nt, synthetic construct
  source 1..20: mol_type = other RNA
tttcatcattcattatgcct

SEQ ID NO: 824 - RNA, 20 nt, synthetic construct
  source 1..20: mol_type = other RNA
ttttcatcattcattatgcc

SEQ ID NO: 825 - RNA, 20 nt, synthetic construct
  source 1..20: mol_type = other RNA
tgaaaaatttaacctgaagt

SEQ ID NO: 826 - RNA, 20 nt, synthetic construct
  source 1..20: mol_type = other RNA
tgtagttgttcacatagcga

SEQ ID NO: 827 - RNA, 20 nt, synthetic construct
  source 1..20: mol_type = other RNA
aacaactacacgaacagctt

SEQ ID NO: 828 - RNA, 20 nt, synthetic construct
  source 1..20: mol_type = other RNA
caactacacgaacagcttcg

SEQ ID NO: 829 - RNA, 20 nt, synthetic construct
  source 1..20: mol_type = other RNA
aactacacgaacagcttcgg

SEQ ID NO: 830 - RNA, 20 nt, synthetic construct
  source 1..20: mol_type = other RNA
cgaacagcttcgggggtgag

SEQ ID NO: 831 - RNA, 20 nt, synthetic construct
  source 1..20: mol_type = other RNA
cgggggtgagtggagtgcac

SEQ ID NO: 832 - RNA, 20 nt, synthetic construct
  source 1..20: mol_type = other RNA
gagtatctcttcatggtgtc

SEQ ID NO: 833 - RNA, 20 nt, synthetic construct
  source 1..20: mol_type = other RNA
gtacatggagtatctcttca

SEQ ID NO: 834 - RNA, 20 nt, synthetic construct
  source 1..20: mol_type = other RNA
acctttgggtgtcaggtaca

SEQ ID NO: 835 - RNA, 20 nt, synthetic construct
  source 1..20: mol_type = other RNA
tccatgtacctgacacccaa

SEQ ID NO: 836 - RNA, 20 nt, synthetic construct
  source 1..20: mol_type = other RNA
tcagacggggagaggaagtc

SEQ ID NO: 837 - RNA, 20 nt, synthetic construct
  source 1..20: mol_type = other RNA
cctggtcttcagacggggag

SEQ ID NO: 838 - RNA, 20 nt, synthetic construct
  source 1..20: mol_type = other RNA
tcagcacctggtcttcagac

SEQ ID NO: 839 - RNA, 20 nt, synthetic construct
  source 1..20: mol_type = other RNA
ctcagcacctggtcttcaga

SEQ ID NO: 840 - RNA, 20 nt, synthetic construct
  source 1..20: mol_type = other RNA
cctctccccgtctgaagacc

SEQ ID NO: 841 - RNA, 20 nt, synthetic construct
  source 1..20: mol_type = other RNA
ccaaggcaggcctcagcacc

SEQ ID NO: 842 - RNA, 20 nt, synthetic construct
  source 1..20: mol_type = other RNA
caggtgctgaggcctgcctt

SEQ ID NO: 843 - RNA, 20 nt, synthetic construct
  source 1..20: mol_type = other RNA
gccactgagctgcccaaggc

SEQ ID NO: 844 - RNA, 20 nt, synthetic construct
  source 1..20: mol_type = other RNA
cagagccactgagctgccca

SEQ ID NO: 845 - RNA, 20 nt, synthetic construct
  source 1..20: mol_type = other RNA
gcctgccttgggcagctcag

SEQ ID NO: 846 - RNA, 20 nt, synthetic construct
  source 1..20: mol_type = other RNA
ctcagtggctctgaactgca

SEQ ID NO: 847 - RNA, 20 nt, synthetic construct
  source 1..20: mol_type = other RNA
tggctctgaactgcacggct

SEQ ID NO: 848 - RNA, 20 nt, synthetic construct
  source 1..20: mol_type = other RNA
ggctctgaactgcacggctt

SEQ ID NO: 849 - RNA, 20 nt, synthetic construct
  source 1..20: mol_type = other RNA
gcacggcttgggtagtctct

SEQ ID NO: 850 - RNA, 20 nt, synthetic construct
  source 1..20: mol_type = other RNA
actgaaggcagggagcagtg

SEQ ID NO: 851 - RNA, 20 nt, synthetic construct
  source 1..20: mol_type = other RNA
gactgaaggcagggagcagt

SEQ ID NO: 852 - RNA, 20 nt, synthetic construct
  source 1..20: mol_type = other RNA
cagccactggactgaaggca

SEQ ID NO: 853 - RNA, 20 nt, synthetic construct
  source 1..20: mol_type = other RNA
tcagccactggactgaaggc

SEQ ID NO: 854 - RNA, 20 nt, synthetic construct
  source 1..20: mol_type = other RNA
gctccctgccttcagtccag

SEQ ID NO: 855 - RNA, 20 nt, synthetic construct
  source 1..20: mol_type = other RNA
gaagcccgtctttcagccac

SEQ ID NO: 856 - RNA, 20 nt, synthetic construct
  source 1..20: mol_type = other RNA
cagtccagtggctgaaagac

SEQ ID NO: 857 - RNA, 20 nt, synthetic construct
  source 1..20: mol_type = other RNA
gctgaaagacgggcttccat

SEQ ID NO: 858 - RNA, 20 nt, synthetic construct
  source 1..20: mol_type = other RNA
ctgaaagacgggcttccatt

SEQ ID NO: 859 - RNA, 20 nt, synthetic construct
  source 1..20: mol_type = other RNA
tagtggcccccaattcccaa

SEQ ID NO: 860 - RNA, 20 nt, synthetic construct
  source 1..20: mol_type = other RNA
cgggcttccattgggaattg

SEQ ID NO: 861 - RNA, 20 nt, synthetic construct
  source 1..20: mol_type = other RNA
gggcttccattgggaattgg

SEQ ID NO: 862 - RNA, 20 nt, synthetic construct
  source 1..20: mol_type = other RNA
agtactcgtggaggctgtag

SEQ ID NO: 863 - RNA, 20 nt, synthetic construct
  source 1..20: mol_type = other RNA
cttaccaggagtactcgtgg

SEQ ID NO: 864 - RNA, 20 nt, synthetic construct
  source 1..20: mol_type = other RNA
tctcttaccaggagtactcg

SEQ ID NO: 865 - RNA, 20 nt, synthetic construct
  source 1..20: mol_type = other RNA
acagcctccacgagtactcc

SEQ ID NO: 866 - RNA, 20 nt, synthetic construct
  source 1..20: mol_type = other RNA
atgtagactgccaaagtgta

SEQ ID NO: 867 - RNA, 20 nt, synthetic construct
  source 1..20: mol_type = other RNA
tgtagactgccaaagtgtat

SEQ ID NO: 868 - RNA, 20 nt, synthetic construct
  source 1..20: mol_type = other RNA
agtgtatgggatgctttcaa

SEQ ID NO: 869 - RNA, 20 nt, synthetic construct
  source 1..20: mol_type = other RNA
tcttcttcagtaatgttgca

SEQ ID NO: 870 - RNA, 20 nt, synthetic construct
  source 1..20: mol_type = other RNA
tgagttcccaacttcattag

SEQ ID NO: 871 - RNA, 20 nt, synthetic construct
  source 1..20: mol_type = other RNA
ctatcagccactaatgaagt

SEQ ID NO: 872 - RNA, 20 nt, synthetic construct
  source 1..20: mol_type = other RNA
tatcagccactaatgaagtt

SEQ ID NO: 873 - RNA, 20 nt, synthetic construct
  source 1..20: mol_type = other RNA
tcagaccgtaccttgcaaca

SEQ ID NO: 874 - RNA, 20 nt, synthetic construct
  source 1..20: mol_type = other RNA
tgaaagcatcccatacactt

SEQ ID NO: 875 - RNA, 20 nt, synthetic construct
  source 1..20: mol_type = other RNA
aacttgatcacctgtcacgt

SEQ ID NO: 876 - RNA, 20 nt, synthetic construct
  source 1..20: mol_type = other RNA
gctggttctaccaacgtgac

SEQ ID NO: 877 - RNA, 20 nt, synthetic construct
  source 1..20: mol_type = other RNA
aggtgatcaagttaagaagc

SEQ ID NO: 878 - RNA, 20 nt, synthetic construct
  source 1..20: mol_type = other RNA
tcataaccaggtcgttggag

SEQ ID NO: 879 - RNA, 20 nt, synthetic construct
  source 1..20: mol_type = other RNA
catgttcataaccaggtcgt

SEQ ID NO: 880 - RNA, 20 nt, synthetic construct
  source 1..20: mol_type = other RNA
ggacgtcctctccaacgacc

SEQ ID NO: 881 - RNA, 20 nt, synthetic construct
  source 1..20: mol_type = other RNA
actttaacatgttcataacc

SEQ ID NO: 882 - RNA, 20 nt, synthetic construct
  source 1..20: mol_type = other RNA
cacgagaacacacgtggcaa

SEQ ID NO: 883 - RNA, 20 nt, synthetic construct
  source 1..20: mol_type = other RNA
ttctgacacgagaacacacg

SEQ ID NO: 884 - RNA, 20 nt, synthetic construct
  source 1..20: mol_type = other RNA
agataaacacgccatcatag

SEQ ID NO: 885 - RNA, 20 nt, synthetic construct
  source 1..20: mol_type = other RNA
acacgccatcatagtggaac

SEQ ID NO: 886 - RNA, 20 nt, synthetic construct
  source 1..20: mol_type = other RNA
tacagacccacccttttctc

SEQ ID NO: 887 - RNA, 20 nt, synthetic construct
  source 1..20: mol_type = other RNA
catagtggaaccggagaaaa

SEQ ID NO: 888 - RNA, 20 nt, synthetic construct
  source 1..20: mol_type = other RNA
agtggaaccggagaaaaggg

SEQ ID NO: 889 - RNA, 20 nt, synthetic construct
  source 1..20: mol_type = other RNA
gtggaaccggagaaaagggt

SEQ ID NO: 890 - RNA, 20 nt, synthetic construct
  source 1..20: mol_type = other RNA
tggtcgtgcaatctgggcat

SEQ ID NO: 891 - RNA, 20 nt, synthetic construct
  source 1..20: mol_type = other RNA
cagaagtggtcgtgcaatct

SEQ ID NO: 892 - RNA, 20 nt, synthetic construct
  source 1..20: mol_type = other RNA
cacaggagcagctccagaag

SEQ ID NO: 893 - RNA, 20 nt, synthetic construct
  source 1..20: mol_type = other RNA
gctcctgtgcgcacagcgcg

SEQ ID NO: 894 - RNA, 20 nt, synthetic construct
  source 1..20: mol_type = other RNA
gcgcacagcgcgaggcgccg

SEQ ID NO: 895 - RNA, 20 nt, synthetic construct
  source 1..20: mol_type = other RNA
ccgcggcgctggctcgcggg

SEQ ID NO: 896 - RNA, 20 nt, synthetic construct
  source 1..20: mol_type = other RNA
ccccgcgagccagcgccgcg

SEQ ID NO: 897 - RNA, 20 nt, synthetic construct
  source 1..20: mol_type = other RNA
gttgatcatctccccaacct

SEQ ID NO: 898 - RNA, 20 nt, synthetic construct
  source 1..20: mol_type = other RNA
atgatcaacgtttccgtgtc

SEQ ID NO: 899 - RNA, 20 nt, synthetic construct
  source 1..20: mol_type = other RNA
tgatcaacgtttccgtgtcc

SEQ ID NO: 900 - RNA, 20 nt, synthetic construct
  source 1..20: mol_type = other RNA
cagcagggagggcccggaca

SEQ ID NO: 901 - RNA, 20 nt, synthetic construct
  source 1..20: mol_type = other RNA
ccgtgggccgccagcaggga

SEQ ID NO: 902 - RNA, 20 nt, synthetic construct
  source 1..20: mol_type = other RNA
accgtgggccgccagcaggg

SEQ ID NO: 903 - RNA, 20 nt, synthetic construct
  source 1..20: mol_type = other RNA
gtccgggccctccctgctgg

SEQ ID NO: 904 - RNA, 20 nt, synthetic construct
  source 1..20: mol_type = other RNA
ggcaccgtgggccgccagca

SEQ ID NO: 905 - RNA, 20 nt, synthetic construct
  source 1..20: mol_type = other RNA
gtcagcgtccggggcaccgt

SEQ ID NO: 906 - RNA, 20 nt, synthetic construct
  source 1..20: mol_type = other RNA
ggtcagcgtccggggcaccg

SEQ ID NO: 907 - RNA, 20 nt, synthetic construct
  source 1..20: mol_type = other RNA
ggccgctcatcgcagcactg

SEQ ID NO: 908 - RNA, 20 nt, synthetic construct
  source 1..20: mol_type = other RNA
ggccgcagtgctgcgatgag

SEQ ID NO: 909 - RNA, 20 nt, synthetic construct
  source 1..20: mol_type = other RNA
gtgttggggtaggggctgcc

SEQ ID NO: 910 - RNA, 20 nt, synthetic construct
  source 1..20: mol_type = other RNA
tgatgccaggtgttggggta

SEQ ID NO: 911 - RNA, 20 nt, synthetic construct
  source 1..20: mol_type = other RNA
atgatgccaggtgttggggt

SEQ ID NO: 912 - RNA, 20 nt, synthetic construct
  source 1..20: mol_type = other RNA
ggcgatgatgccaggtgttg

SEQ ID NO: 913 - RNA, 20 nt, synthetic construct
  source 1..20: mol_type = other RNA
caggcgatgatgccaggtgt

SEQ ID NO: 914 - RNA, 20 nt, synthetic construct
  source 1..20: mol_type = other RNA
agcctcgtgctcttctcggt

SEQ ID NO: 915 - RNA, 20 nt, synthetic construct
  source 1..20: mol_type = other RNA
cctcgtgctcttctcggttg

SEQ ID NO: 916 - RNA, 20 nt, synthetic construct
  source 1..20: mol_type = other RNA
ggttggggtggtcctagccc

SEQ ID NO: 917 - RNA, 20 nt, synthetic construct
  source 1..20: mol_type = other RNA
ctgcagcaggttgagcacca

SEQ ID NO: 918 - RNA, 20 nt, synthetic construct
  source 1..20: mol_type = other RNA
tctgcagcaggttgagcacc

SEQ ID NO: 919 - RNA, 20 nt, synthetic construct
  source 1..20: mol_type = other RNA
cattcctctggatctgcagc

SEQ ID NO: 920 - RNA, 20 nt, synthetic construct
  source 1..20: mol_type = other RNA
tcaacctgctgcagatccag

SEQ ID NO: 921 - RNA, 20 nt, synthetic construct
  source 1..20: mol_type = other RNA
ggaagagagtgacattcctc

SEQ ID NO: 922 - RNA, 20 nt, synthetic construct
  source 1..20: mol_type = other RNA
gaatgtcactctcttccccg

SEQ ID NO: 923 - RNA, 20 nt, synthetic construct
  source 1..20: mol_type = other RNA
tgtcactctcttccccgagg

SEQ ID NO: 924 - RNA, 20 nt, synthetic construct
  source 1..20: mol_type = other RNA
tggtggcgatcacctcctcg

SEQ ID NO: 925 - RNA, 20 nt, synthetic construct
  source 1..20: mol_type = other RNA
atggtggcgatcacctcctc

SEQ ID NO: 926 - RNA, 20 nt, synthetic construct
  source 1..20: mol_type = other RNA
gatggtggcgatcacctcct

SEQ ID NO: 927 - RNA, 20 nt, synthetic construct
  source 1..20: mol_type = other RNA
ccaccaggcggaggaaaaga

SEQ ID NO: 928 - RNA, 20 nt, synthetic construct
  source 1..20: mol_type = other RNA
ccaccatcttttcctccgcc

SEQ ID NO: 929 - RNA, 20 nt, synthetic construct
  source 1..20: mol_type = other RNA
gggagggacccaccaggcgg

SEQ ID NO: 930 - RNA, 20 nt, synthetic construct
  source 1..20: mol_type = other RNA
catcttttcctccgcctggt

SEQ ID NO: 931 - RNA, 20 nt, synthetic construct
  source 1..20: mol_type = other RNA
gcagggagggacccaccagg

SEQ ID NO: 932 - RNA, 20 nt, synthetic construct
  source 1..20: mol_type = other RNA
ctgctgtcccgcagcaggga

SEQ ID NO: 933 - RNA, 20 nt, synthetic construct
  source 1..20: mol_type = other RNA
tggtgggtccctccctgctg

SEQ ID NO: 934 - RNA, 20 nt, synthetic construct
  source 1..20: mol_type = other RNA
ccagctgctgtcccgcagca

SEQ ID NO: 935 - RNA, 20 nt, synthetic construct
  source 1..20: mol_type = other RNA
aagactctttaaagaaggca

SEQ ID NO: 936 - RNA, 20 nt, synthetic construct
  source 1..20: mol_type = other RNA
agtactcattctcactgagt

SEQ ID NO: 937 - RNA, 20 nt, synthetic construct
  source 1..20: mol_type = other RNA
cgtaaatgctgatatgtatc

SEQ ID NO: 938 - RNA, 20 nt, synthetic construct
  source 1..20: mol_type = other RNA
tgcaataatgctgctgaagt

SEQ ID NO: 939 - RNA, 20 nt, synthetic construct
  source 1..20: mol_type = other RNA
agttatccttctggttcact

SEQ ID NO: 940 - RNA, 20 nt, synthetic construct
  source 1..20: mol_type = other RNA
gtcagtgaaccaagtgttaa

SEQ ID NO: 941 - RNA, 20 nt, synthetic construct
  source 1..20: mol_type = other RNA
aaggccgtcagttcatcctg

SEQ ID NO: 942 - RNA, 20 nt, synthetic construct
  source 1..20: mol_type = other RNA
cctgcctcaggatgaactga

SEQ ID NO: 943 - RNA, 20 nt, synthetic construct
  source 1..20: mol_type = other RNA
acggccttgaatgtaaaaca

SEQ ID NO: 944 - RNA, 20 nt, synthetic construct
  source 1..20: mol_type = other RNA
taaccagcctgctgtctctg

SEQ ID NO: 945 - RNA, 20 nt, synthetic construct
  source 1..20: mol_type = other RNA
ttccttcaggctgacttgac

SEQ ID NO: 946 - RNA, 20 nt, synthetic construct
  source 1..20: mol_type = other RNA
ctgacttgacaggaattaag

SEQ ID NO: 947 - RNA, 20 nt, synthetic construct
  source 1..20: mol_type = other RNA
ttaagtggaaaaaatatgta

SEQ ID NO: 948 - RNA, 20 nt, synthetic construct
  source 1..20: mol_type = other RNA
tgtcacaggaaacagaatag

SEQ ID NO: 949 - RNA, 20 nt, synthetic construct
  source 1..20: mol_type = other RNA
aagtgaagctgagcagcgag

SEQ ID NO: 950 - RNA, 20 nt, synthetic construct
  source 1..20: mol_type = other RNA
agacgtgaccataagtgcct

SEQ ID NO: 951 - RNA, 20 nt, synthetic construct
  source 1..20: mol_type = other RNA
gcgccgcccagcgcggacac

SEQ ID NO: 952 - RNA, 20 nt, synthetic construct
  source 1..20: mol_type = other RNA
ttattattttacagctgaca

SEQ ID NO: 953 - RNA, 20 nt, synthetic construct
  source 1..20: mol_type = other RNA
tattattttacagctgacat

SEQ ID NO: 954 - RNA, 20 nt, synthetic construct
  source 1..20: mol_type = other RNA
aaatctgctaaaggcttcaa

SEQ ID NO: 955 - RNA, 20 nt, synthetic construct
  source 1..20: mol_type = other RNA
tttagcagatttggatccag

SEQ ID NO: 956 - RNA, 20 nt, synthetic construct
  source 1..20: mol_type = other RNA
attggttcaaattgtatagt

SEQ ID NO: 957 - RNA, 20 nt, synthetic construct
  source 1..20: mol_type = other RNA
agagaaactttaaatccttt

SEQ ID NO: 958 - RNA, 20 nt, synthetic construct
  source 1..20: mol_type = other RNA
ttctagtttgcaatggattt

SEQ ID NO: 959 - RNA, 20 nt, synthetic construct
  source 1..20: mol_type = other RNA
atgtcttttctagtttgcaa

SEQ ID NO: 960 - RNA, 20 nt, synthetic construct
  source 1..20: mol_type = other RNA
ggataaacaagatctgttga

SEQ ID NO: 961 - RNA, 20 nt, synthetic construct
  source 1..20: mol_type = other RNA
tctgttgaaggagcgccaaa

SEQ ID NO: 962 - RNA, 20 nt, synthetic construct
  source 1..20: mol_type = other RNA
ggatttaaagtttctctcag

SEQ ID NO: 963 - RNA, 20 nt, synthetic construct
  source 1..20: mol_type = other RNA
ctccgggtaccagttcccgc

SEQ ID NO: 964 - RNA, 20 nt, synthetic construct
  source 1..20: mol_type = other RNA
ctcagcggctcctcagctgc

SEQ ID NO: 965 - RNA, 20 nt, synthetic construct
  source 1..20: mol_type = other RNA
cagcatgaaggcgctgagcc

SEQ ID NO: 966 - RNA, 20 nt, synthetic construct
  source 1..20: mol_type = other RNA
aaggcgctgagcccggtgcg

SEQ ID NO: 967 - RNA, 20 nt, synthetic construct
  source 1..20: mol_type = other RNA
cccggtgcgcggctgctacg

SEQ ID NO: 968 - RNA, 20 nt, synthetic construct
  source 1..20: mol_type = other RNA
cgaggcggtgtgctgcctgt

SEQ ID NO: 969 - RNA, 20 nt, synthetic construct
  source 1..20: mol_type = other RNA
tggccagactgcgttccgac

SEQ ID NO: 970 - RNA, 20 nt, synthetic construct
  source 1..20: mol_type = other RNA
ttccgtgttctcggcattgt

SEQ ID NO: 971 - RNA, 20 nt, synthetic construct
  source 1..20: mol_type = other RNA
ggcgattcccagctcgaggc

SEQ ID NO: 972 - RNA, 20 nt, synthetic construct
  source 1..20: mol_type = other RNA
gctggtgcaagaccccgagt

SEQ ID NO: 973 - RNA, 20 nt, synthetic construct
  source 1..20: mol_type = other RNA
attgttggtttgctgcacca

SEQ ID NO: 974 - RNA, 20 nt, synthetic construct
  source 1..20: mol_type = other RNA
aaccaacaatgccgagaaca

SEQ ID NO: 975 - RNA, 20 nt, synthetic construct
  source 1..20: mol_type = other RNA
cgagaacacggaagcgctgc

SEQ ID NO: 976 - RNA, 20 nt, synthetic construct
  source 1..20: mol_type = other RNA
aacacggaagcgctgctggc

SEQ ID NO: 977 - RNA, 14 nt, synthetic construct
  source 1..14: mol_type = other RNA
atgctcaatgcgtc

SEQ ID NO: 978 - RNA, 14 nt, synthetic construct
  source 1..14: mol_type = other RNA
atgctcaatgcgtc

SEQ ID NO: 979 - RNA, 14 nt, synthetic construct
  source 1..14: mol_type = other RNA
tacgagttacgcag

SEQ ID NO: 980 - protein, 353 aa, synthetic construct
LFNQEVQIPLTESYCGPCPKNWICYKNNCYQFFDESKNWYESQASCMSQNASLLKVYSKEDQDLLKLVKSYHWMGLVHIPTNGSWQWEDGSILSPNLLTIIEMQKGDCALYASSFKGYIENCSTPNTYICMQRTVTTTPAPRPPTPAPTIASQPLSLRPEACRPAAGGAVHTRGLDFACDIYIWAPLAGTCGVLLLSLVITLYCRRDQRLPPDAHKPPGGGSFRTPIQEEQADAHSTLAKIRVKFSRSADAPAYQQGQNQLYNELNLGRREEYDVLDKRRGRDPEMGGKPRRKNPQEGLYNELQKDKMAEAYSEIGMKGERRRGKGHDGLYQGLSTATKDTYDALHMQALPPR

SEQ ID NO: 981 - protein, 8 aa, synthetic construct
GVSLPDYG

SEQ ID NO: 982 - protein, 7 aa, synthetic construct
IWGSETT

SEQ ID NO: 983 - protein, 14 aa, synthetic construct
AKHYYYGGSYAMDY

SEQ ID NO: 984 - protein, 6 aa, synthetic construct
QDISKY

SEQ ID NO: 985 - skipped

SEQ ID NO: 986 - protein, 460 aa, synthetic construct
DIQMTQSPSSLSASVGDRVTITCRASQDISKYLNWYQQKPGGTVKLLIYHTSRLHSGVPSRFSGSGSGTDFTLTISSLQPEDIATYFCQQGNTLPYTFGGGTKLEITGGGGSGGGGSGGGGSQVQLQESGPGLVKPSQTLSLTCTVSGVSLPDYGVSWIRQPPGKGLEWIGVIWGSETTYYNSALKSRLTISKDNSKNQVSLKLSSVTAADTAVYYCAKHYYYGGSYAMDYWGQGTSVTVSSTTTPAPRPPTPAPTIASQPLSLRPEACRPAAGGAVHTRGLDFACDIYIWAPLAGTCGVLLLSLVITLYCRRDQRLPPDAHKPPGGGSFRTPIQEEQADAHSTLAKIRVKFSRSADAPAYQQGQNQLYNELNLGRREEYDVLDKRRGRDPEMGGKPRRKNPQEGLYNELQKDKMAEAYSEIGMKGERRRGKGHDGLYQGLSTATKDTYDALHMQALPPR

SEQ ID NO: 987 - protein, 8 aa, synthetic construct
GYTFTSYD

SEQ ID NO: 988 - protein, 8 aa, synthetic construct
ISPSGGGT

SEQ ID NO: 989 - protein, 15 aa, synthetic construct
ARYYGGNPEGWYFDL

SEQ ID NO: 990 - protein, 6 aa, synthetic construct
QSIGNW

SEQ ID NO: 991 - skipped

SEQ ID NO: 992 - protein, 9 aa, synthetic construct
QQSYTTPWT

SEQ ID NO: 993 - protein, 122 aa, synthetic construct
QVQLVQSGAEVKKPGASVKVSCKASGYTFTSYDINWVRQAPGQGLEWMGVISPSGGGTSYAQKFQGRVTMTRDTSTSTVYMELSSLRSEDTAVYYCARYYGGNPEGWYFDLWGRGTLVTVSS

SEQ ID NO: 994 - protein, 107 aa, synthetic construct
DIQMTQSPSSLSASVGDRVTITCRASQSIGNWLAWYQQKPGKAPKLLIYDASDLETGVPSRFSGSGSGTDFTLTISSLQPEDFATYYCQQSYTTPWTFGQGTKVEIK

SEQ ID NO: 995 - protein, 183 aa, synthetic construct
NWVNVISDLKKIEDLIQSMHIDATLYTESDVHPSCKVTAMKCFLLELQVISLESGDASIHDTVENLIILANNSLSSNGNVTESGCKECEELEEKNIKEFLQSFVHIVQMFINTSTTTPAPRPPTPAPTIASQPLSLRPEACRPAAGGAVHTRGLDFACDIYIWAPLAGTCGVLLLSLVITLYC

SEQ ID NO: 996 - RNA, 20 nt, synthetic construct
  source 1..20: mol_type = other RNA
aggattgaagctgacgttct

SEQ ID NO: 997 - RNA, 20 nt, synthetic construct
  source 1..20: mol_type = other RNA
taactgctcccataagtact

SEQ ID NO: 998 - RNA, 20 nt, synthetic construct
  source 1..20: mol_type = other RNA
gtgggattacaccgagaagc

SEQ ID NO: 999 - RNA, 20 nt, synthetic construct
  source 1..20: mol_type = other RNA
taggcaaagatccgttctgt

SEQ ID NO: 1000 - RNA, 20 nt, synthetic construct
  source 1..20: mol_type = other RNA
acctttgctccagtatgtgc

SEQ ID NO: 1001 - RNA, 20 nt, synthetic construct
  source 1..20: mol_type = other RNA
atacctaaagctatcatgaa

SEQ ID NO: 1002 - RNA, 20 nt, synthetic construct
  source 1..20: mol_type = other RNA
gtgaacagtgccgttccggg

SEQ ID NO: 1003 - RNA, 20 nt, synthetic construct
  source 1..20: mol_type = other RNA
ggcaccggtacatttgttaa

SEQ ID NO: 1004 - RNA, 20 nt, synthetic construct
  source 1..20: mol_type = other RNA
ttcgccagacgcgccgcctg

SEQ ID NO: 1005 - RNA, 20 nt, synthetic construct
  source 1..20: mol_type = other RNA
taatctggtggacctcatga

SEQ ID NO: 1006 - RNA, 20 nt, synthetic construct
  source 1..20: mol_type = other RNA
tcggttggcaaacgtccgaa

SEQ ID NO: 1007 - RNA, 20 nt, synthetic construct
  source 1..20: mol_type = other RNA
agcaagctgccgcagatcgc

SEQ ID NO: 1008 - RNA, 20 nt, synthetic construct
  source 1..20: mol_type = other RNA
taatctggtggacctcatga

SEQ ID NO: 1009 - RNA, 20 nt, synthetic construct
  source 1..20: mol_type = other RNA
gaacggtaggtcccctctcg

SEQ ID NO: 1010 - RNA, 20 nt, synthetic construct
  source 1..20: mol_type = other RNA
agctgccttggacgacgggc

SEQ ID NO: 1011 - RNA, 20 nt, synthetic construct
  source 1..20: mol_type = other RNA
tgagccgtaacttcattgag

SEQ ID NO: 1012 - RNA, 20 nt, synthetic construct
  source 1..20: mol_type = other RNA
gcaggcaccaggatgcctgg

SEQ ID NO: 1013 - RNA, 20 nt, synthetic construct
  source 1..20: mol_type = other RNA
gcatagagctggtctcactg

SEQ ID NO: 1014 - protein, 18 aa, synthetic construct
GSTSGSGKPGSGEGSTKG

SEQ ID NO: 1015 - protein, 5 aa, synthetic construct
GGGGS

SEQ ID NO: 1016 - protein, 5 aa, synthetic construct
SFAMS

SEQ ID NO: 1017 - protein, 17 aa, synthetic construct
AVSGSGDDTYYADSVKG

SEQ ID NO: 1018 - protein, 8 aa, synthetic construct
HTSYYLDV

SEQ ID NO: 1019 - protein, 14 aa, synthetic construct
ALSSDSVSTSYFPS

SEQ ID NO: 1020 - protein, 7 aa, synthetic construct
NTNTRSS

SEQ ID NO: 1021 - protein, 9 aa, synthetic construct
VLYMGSGII

SEQ ID NO: 1022 - protein, 117 aa, synthetic construct
EVQLLESGGGLVQPGGSLRLSCAASGFTFSSFAMSWVRQAPGKGLEWVSAVSGSGDDTYYADSVKGRFTISRDNSKNTLYLQMNSLRAEDTAVYYCAKHTSYYLDVWGKGTTVTVSS

SEQ ID NO: 1023 - protein, 109 aa, synthetic construct
QTVVTQEPSFSVSPGGTVTLTCALSSDSVSTSYFPSWYRQTPGQAPRTLIYNTNTRSSGVPDRFSGSILGNKAALTITGAQADDESDYYCVLYMGSGIIFGSGTKVTVL

SEQ ID NO: 1024 - protein, 241 aa, synthetic construct
EVQLLESGGGLVQPGGSLRLSCAASGFTFSSFAMSWVRQAPGKGLEWVSAVSGSGDDTYYADSVKGRFTISRDNSKNTLYLQMNSLRAEDTAVYYCAKHTSYYLDVWGKGTTVTVSSGGGGSGGGGSGGGGSQTVVTQEPSFSVSPGGTVTLTCALSSDSVSTSYFPSWYRQTPGQAPRTLIYNTNTRSSGVPDRFSGSILGNKAALTITGAQADDESDYYCVLYMGSGIIFGSGTKVTVL

SEQ ID NO: 1025 - protein, 244 aa, synthetic construct
QTVVTQEPSFSVSPGGTVTLTCALSSDSVSTSYFPSWYRQTPGQAPRTLIYNTNTRSSGVPDRFSGSILGNKAALTITGAQADDESDYYCVLYMGSGIIFGSGTKVTVLGSTSGSGKPGSGEGSTKGEVQLLESGGGLVQPGGSLRLSCAASGFTFSSFAMSWVRQAPGKGLEWVSAVSGSGDDTYYADSVKGRFTISRDNSKNTLYLQMNSLRAEDTAVYYCAKHTSYYLDVWGKGTTVTVSS

SEQ ID NO: 1026 - protein, 5 aa, synthetic construct
NYGIG

SEQ ID NO: 1027 - protein, 17 aa, synthetic construct
WIIAYNGYTKYAQILQG

SEQ ID NO: 1028 - protein, 13 aa, synthetic construct
QQLGGDYHYYMDV

SEQ ID NO: 1029 - protein, 16 aa, synthetic construct
KSSKSLLHSDGKTYLY

SEQ ID NO: 1030 - protein, 7 aa, synthetic construct
EVSNRFS

SEQ ID NO: 1031 - protein, 9 aa, synthetic construct
MQSIQFPWT

SEQ ID NO: 1032 - protein, 122 aa, synthetic construct
QVQLVQSGTEVKKPGASVKVSCKASGYTFTNYGIGWVRQAPGQGLEWMGWIIAYNGYTKYAQILQGRVTMTTDTSTNTAYMELRSLRSDDTAVYYCARQQLGGDYHYYMDVWGKGTTVTVSS

SEQ ID NO: 1033 - protein, 112 aa, synthetic construct
DIVMTQTPLSLSVTPGQPASISCKSSKSLLHSDGKTYLYWYLQKPGQPPQLLIYEVSNRFSGVPDRFSGSGSGTDFTLKISRVEAEDVGVYYCMQSIQFPWTFGQGTKVEIK

SEQ ID NO: 1034 - protein, 252 aa, synthetic construct
DIVMTQTPLSLSVTPGQPASISCKSSKSLLHSDGKTYLYWYLQKPGQPPQLLIYEVSNRFSGVPDRFSGSGSGTDFTLKISRVEAEDVGVYYCMQSIQFPWTFGQGTKVEIKGSTSGSGKPGSGEGSTKGQVQLVQSGTEVKKPGASVKVSCKASGYTFTNYGIGWVRQAPGQGLEWMGWIIAYNGYTKYAQILQGRVTMTTDTSTNTAYMELRSLRSDDTAVYYCARQQLGGDYHYYMDVWGKGTTVTVSS

SEQ ID NO: 1035 - protein, 249 aa, synthetic construct
QVQLVQSGTEVKKPGASVKVSCKASGYTFTNYGIGWVRQAPGQGLEWMGWIIAYNGYTKYAQILQGRVTMTTDTSTNTAYMELRSLRSDDTAVYYCARQQLGGDYHYYMDVWGKGTTVTVSSGGGGSGGGGSGGGGSDIVMTQTPLSLSVTPGQPASISCKSSKSLLHSDGKTYLYWYLQKPGQPPQLLIYEVSNRFSGVPDRFSGSGSGTDFTLKISRVEAEDVGVYYCMQSIQFPWTFGQGTKVEIK

SEQ ID NO: 1036 - protein, 7 aa, synthetic construct
EVSTRFS

SEQ ID NO: 1037 - protein, 112 aa, synthetic construct
DIVMTQTPLSLSVTPGQPASISCKSSKSLLHSDGKTYLYWYLQKPGQPPQLLIYEVSTRFSGVPDRFSGSGSGTDFTLKISRVEAEDVGVYYCMQSIQFPWTFGQGTKVEIK

SEQ ID NO: 1038 - protein, 252 aa, synthetic construct
QVQLVQSGTEVKKPGASVKVSCKASGYTFTNYGIGWVRQAPGQGLEWMGWIIAYNGYTKYAQILQGRVTMTTDTSTNTAYMELRSLRSDDTAVYYCARQQLGGDYHYYMDVWGKGTTVTVSSGSTSGSGKPGSGEGSTKGDIVMTQTPLSLSVTPGQPASISCKSSKSLLHSDGKTYLYWYLQKPGQPPQLLIYEVSTRFSGVPDRFSGSGSGTDFTLKISRVEAEDVGVYYCMQSIQFPWTFGQGTKVEIK

SEQ ID NO: 1039 - protein, 252 aa, synthetic construct
DIVMTQTPLSLSVTPGQPASISCKSSKSLLHSDGKTYLYWYLQKPGQPPQLLIYEVSTRFSGVPDRFSGSGSGTDFTLKISRVEAEDVGVYYCMQSIQFPWTFGQGTKVEIKGSTSGSGKPGSGEGSTKGQVQLVQSGTEVKKPGASVKVSCKASGYTFTNYGIGWVRQAPGQGLEWMGWIIAYNGYTKYAQILQGRVTMTTDTSTNTAYMELRSLRSDDTAVYYCARQQLGGDYHYYMDVWGKGTTVTVSS

SEQ ID NO: 1040 - protein, 5 aa, synthetic construct
NYGMH

SEQ ID NO: 1041 - protein, 17 aa, synthetic construct
VIWSDGHNKYYADSVKG

SEQ ID NO: 1042 - protein, 13 aa, synthetic construct
AQLERRYFYYMDV

SEQ ID NO: 1043 - protein, 14 aa, synthetic construct
GLTSGSVSTSYYPN

SEQ ID NO: 1044 - protein, 7 aa, synthetic construct
STNIRSS

SEQ ID NO: 1045 - protein, 10 aa, synthetic construct
VLYMGSGMFI

SEQ ID NO: 1046 - protein, 122 aa, synthetic construct
QVQLVESGGGVVQPGRSLRLSCAASGFTFSNYGMHWVRQAPGKGLEWMAVIWSDGHNKYYADSVKGRFTISRDNSKNTLYLQMNSLRAEDTAVYYCARAQLERRYFYYMDVWGKGTTVTVSS

SEQ ID NO: 1047 - protein, 110 aa, synthetic construct
QTVVTQEPSFSVSPGGTVTLTCGLTSGSVSTSYYPNWYQQTPGQAPRTLIYSTNIRSSGVPDRFSGSILGNKAALTITGAQADDESDYYCVLYMGSGMFIFGSGTKVTVL

SEQ ID NO: 1048 - protein, 247 aa, synthetic construct
QVQLVESGGGVVQPGRSLRLSCAASGFTFSNYGMHWVRQAPGKGLEWMAVIWSDGHNKYYADSVKGRFTISRDNSKNTLYLQMNSLRAEDTAVYYCARAQLERRYFYYMDVWGKGTTVTVSSGGGGSGGGGSGGGGSQTVVTQEPSFSVSPGGTVTLTCGLTSGSVSTSYYPNWYQQTPGQAPRTLIYSTNIRSSGVPDRFSGSILGNKAALTITGAQADDESDYYCVLYMGSGMFIFGSGTKVTVL

SEQ ID NO: 1049 - protein, 250 aa, synthetic construct
QVQLVESGGGVVQPGRSLRLSCAASGFTFSNYGMHWVRQAPGKGLEWMAVIWSDGHNKYYADSVKGRFTISRDNSKNTLYLQMNSLRAEDTAVYYCARAQLERRYFYYMDVWGKGTTVTVSSGSTSGSGKPGSGEGSTKGQTVVTQEPSFSVSPGGTVTLTCGLTSGSVSTSYYPNWYQQTPGQAPRTLIYSTNIRSSGVPDRFSGSILGNKAALTITGAQADDESDYYCVLYMGSGMFIFGSGTKVTVL

SEQ ID NO: 1050 - protein, 5 aa, synthetic construct
NYDMH

SEQ ID NO: 1051 - protein, 17 aa, synthetic construct
IIWHDASNKYYLDSVKG

SEQ ID NO: 1052 - protein, 16 aa, synthetic construct
GDNWNDEHHYFYYMDV

SEQ ID NO: 1053 - protein, 11 aa, synthetic construct
RASQSIGSSLH

SEQ ID NO: 1054 - protein, 7 aa, synthetic construct
FASQSFS

SEQ ID NO: 1055 - protein, 9 aa, synthetic construct
HQSSSLPWT

SEQ ID NO: 1056 - protein, 125 aa, synthetic construct
QVQLVESGGGVVQPGRSLRLSCAASGFTFSNYDMHWVRQAPGKGLEWVTIIWHDASNKYYLDSVKGRFTISRDNSKNTLYLQMNSLRAEDTAVYYCARGDNWNDEHHYFYYMDVWGKGTTVTVSS

SEQ ID NO: 1057 - protein, 107 aa, synthetic construct
EIVLTQSPDFQSVTPKEKVTITCRASQSIGSSLHWYQQKPDQSPKLLIKFASQSFSGVPSRFSGSGSGTDFTLTIHSLEAEDAATYYCHQSSSLPWTFGQGTKVEIK

SEQ ID NO: 1058 - protein, 247 aa, synthetic construct
QVQLVESGGGVVQPGRSLRLSCAASGFTFSNYDMHWVRQAPGKGLEWVTIIWHDASNKYYLDSVKGRFTISRDNSKNTLYLQMNSLRAEDTAVYYCARGDNWNDEHHYFYYMDVWGKGTTVTVSSGGGGSGGGGSGGGGSEIVLTQSPDFQSVTPKEKVTITCRASQSIGSSLHWYQQKPDQSPKLLIKFASQSFSGVPSRFSGSGSGTDFTLTIHSLEAEDAATYYCHQSSSLPWTFGQGTKVEIK

SEQ ID NO: 1059 - protein, 17 aa, synthetic construct
IIWHDGSNKYYLDSVKG

SEQ ID NO: 1060 - protein, 125 aa, synthetic construct
QVQLVESGGGVVQPGRSLRLSCAASGFTFSNYDMHWVRQAPGKGLEWVTIIWHDGSNKYYLDSVKGRFTISRDNSKNTLYLQMNSLRAEDTAVYYCARGDNWNDEHHYFYYMDVWGKGTTVTVSS

SEQ ID NO: 1061 - protein, 247 aa, synthetic construct
QVQLVESGGGVVQPGRSLRLSCAASGFTFSNYDMHWVRQAPGKGLEWVTIIWHDGSNKYYLDSVKGRFTISRDNSKNTLYLQMNSLRAEDTAVYYCARGDNWNDEHHYFYYMDVWGKGTTVTVSSGGGGSGGGGSGGGGSEIVLTQSPDFQSVTPKEKVTITCRASQSIGSSLHWYQQKPDQSPKLLIKFASQSFSGVPSRFSGSGSGTDFTLTIHSLEAEDAATYYCHQSSSLPWTFGQGTKVEIK

SEQ ID NO: 1062 - protein, 5 aa, synthetic construct
SYVMN

SEQ ID NO: 1063 - protein, 17 aa, synthetic construct
SVSGSGNNSFYADSVKG

SEQ ID NO: 1064 - protein, 14 aa, synthetic construct
RSSSYLYYYYYMDV

SEQ ID NO: 1065 - protein, 12 aa, synthetic construct
RASQSVSSSYLA

SEQ ID NO: 1066 - protein, 7 aa, synthetic construct
GASSRAT

SEQ ID NO: 1067 - protein, 11 aa, synthetic construct
QHYGSSPPRIT

SEQ ID NO: 1068 - protein, 123 aa, synthetic construct
EVQLLESGGGLVQPGGSLRLSCAASGFTFSSYVMNWVRQAPGKGLEWVSSVSGSGNNSFYADSVKGRFTISRDNSKNTLYLQMNSLRAEDTAVYYCASRSSSYLYYYYYMDVWGKGTTVTVSS

SEQ ID NO: 1069 - protein, 110 aa, synthetic construct
EIVLTQSPGTLSLSPGERATLSCRASQSVSSSYLAWYQQKPGQAPRLLIYGASSRATGIPDRFSDSGSGTDFTLTISRLEPEDFAVYYCQHYGSSPPRITFGPGTKVDIK

SEQ ID NO: 1070 - protein, 248 aa, synthetic construct
EVQLLESGGGLVQPGGSLRLSCAASGFTFSSYVMNWVRQAPGKGLEWVSSVSGSGNNSFYADSVKGRFTISRDNSKNTLYLQMNSLRAEDTAVYYCASRSSSYLYYYYYMDVWGKGTTVTVSSGGGGSGGGGSGGGGSEIVLTQSPGTLSLSPGERATLSCRASQSVSSSYLAWYQQKPGQAPRLLIYGASSRATGIPDRFSDSGSGTDFTLTISRLEPEDFAVYYCQHYGSSPPRITFGPGTKVDIK

SEQ ID NO: 1071 - protein, 5 aa, synthetic construct
TYAMS

SEQ ID NO: 1072 - protein, 17 aa, synthetic construct
AISGSGENIYYADSVKG

SEQ ID NO: 1073 - protein, 8 aa, synthetic construct
HTSYYMDV

SEQ ID NO: 1074 - protein, 14 aa, synthetic construct
GLYSDSVSTSYYPS

SEQ ID NO: 1075 - protein, 9 aa, synthetic construct
VLYMVSGIV

SEQ ID NO: 1076 - protein, 117 aa, synthetic construct
EVQLLESGGDLVQPGGSLRLSCAASGFTFSTYAMSWVRQAPGKGLEWVSAISGSGENIYYADSVKGRFTISRDNSKNTLFLQMNSLRAEDTAVYYCAKHTSYYMDVWGKGTTVTVSS

SEQ ID NO: 1077 - protein, 109 aa, synthetic construct
QTVVTQEPSFSVSPGGTVTLTCGLYSDSVSTSYYPSWYQQTPGQAPRTLIYNTNTRSSGVPDRFSGSILGNKAALTITGAQADDESDYYCVLYMVSGIVFGSGTKVTVL

SEQ ID NO: 1078 - protein, 240 aa, synthetic construct
EVQLLESGGDLVQPGGSLRLSCAASGFTFSTYAMSWVRQAPGKGLEWVSAISGSGENIYYADSVKGRFTISRDNSKNTLFLQMNSLRAEDTAVYYCAKHTSYYMDVWGKGTTVTVSSGGGGSGGGGSGGGGSQTVVTQEPSFSVSPGGTVTLTCGLYSDSVSTSYYPSWYQQTPGQAPRTLIYNTNTRSSGVPDRFSGSILGNKAALTITGAQADDESDYYCVLYMVSGIVFGSGTKVTV

SEQ ID NO: 1079 - protein, 5 aa, synthetic construct
SYGMH

SEQ ID NO: 1080 - protein, 17 aa, synthetic construct
VISYDGSNKYYADSVKG

SEQ ID NO: 1081 - protein, 9 aa, synthetic construct
DHYYYYMDV

SEQ ID NO: 1082 - protein, 14 aa, synthetic construct
GLSSGSVSTSYYPS

SEQ ID NO: 1083 - protein, 10 aa, synthetic construct
VLYMGSDIVV

SEQ ID NO: 1084 - protein, 118 aa, synthetic construct
QVQLVESGGGVVQPGRSLRLSCAASGFTFSSYGMHWVRQAPGKGLEWVAVISYDGSNKYYADSVKGRFTISRDNSKTTLYLQMNSLRAEDTAVYYCARDHYYYYMDVWGKGTTVTVSS

SEQ ID NO: 1085 - protein, 107 aa, synthetic construct
VTQEPSFSVSPGGTVTLTCGLSSGSVSTSYYPSWYQQTPGQAPRTLIYSTNIRSSGVPDRFSGSILGNKAALTITGAQADDESDYYCVLYMGSDIVVFGGGTKLTVL

SEQ ID NO: 1086 - protein, 243 aa, synthetic construct
QVQLVESGGGVVQPGRSLRLSCAASGFTFSSYGMHWVRQAPGKGLEWVAVISYDGSNKYYADSVKGRFTISRDNSKTTLYLQMNSLRAEDTAVYYCARDHYYYYMDVWGKGTTVTVSSGSTSGSGKPGSGEGSTKGVTQEPSFSVSPGGTVTLTCGLSSGSVSTSYYPSWYQQTPGQAPRTLIYSTNIRSSGVPDRFSGSILGNKAALTITGAQADDESDYYCVLYMGSDIVVFGGGTKLTVL

SEQ ID NO: 1087 - protein, 119 aa, synthetic construct
QVKLEESGGGLVQAGRSLRLSCAASEHTFSSHVMGWFRQAPGKERESVAVIGWRDISTSYADSVKGRFTISRDNAKKTLYLQMNSLKPEDTAVYYCAARRIDAADFDSWGQGTQVTVSS

SEQ ID NO: 1088 - protein, 118 aa, synthetic construct
EVQLVESGGGLVQAGGSLRLSCAASGRTFTMGWFRQAPGKEREFVAAISLSPTLAYYAESVKGRFTISRDNAKNTVVLQMNSLKPEDTALYYCAADRKSVMSIRPDYWGQGTQVTVSS

SEQ ID NO: 1089 - protein, 42 aa, synthetic construct
KRGRKKLLYIFKQPFMRPVQTTQEEDGCSCRFPEEEEGGCEL

1-82. (canceled)

83. A population of gene edited natural killer (NK) cells, wherein:
the NK cells are genetically edited within a target sequence in a MED12 gene and within a target sequence in a CISH gene; and
the edits yield reduced expression of each of the MED12 protein encoded by the MED12 gene and the CIS protein encoded by the CISH gene, as compared to a NK cell not edited within the target sequence in the MED12 gene and the target sequence within the CISH gene.

84. The population of gene edited NK cells of claim 83, wherein the target sequence within the MED12 gene comprises any one of SEQ ID NOS: 938-944 and 996-998.

85. The population of gene edited NK cells of claim 83, wherein the target sequence in the CISH gene comprises any one of SEQ ID NOS: 153-157, 463-466, 1012, and 1013.

86. The population of gene edited NK cells of claim 83, wherein the NK cells express a cytotoxic receptor comprising an extracellular ligand binding domain, a transmembrane domain, and a cytotoxic signaling complex.

87. The population of gene edited NK cells of claim 86, wherein the cytotoxic signaling complex comprises a CD3zeta domain and an intracellular signaling domain of OX40 or a signaling portion thereof.

88. The population of gene edited NK cells of claim 83, wherein the NK cells express a membrane-bound interleukin-15 (mbIL15).

89. A composition comprising the population of gene edited NK cells of claim 83.

90. A method for the treatment of a subject having a disease or condition comprising administering to the subject the composition of claim 89.

91. A composition comprising the population of gene edited NK cells of claim 88.

92. A method for the treatment of a subject having a disease or condition comprising administering to the subject the composition of claim 91.

93. A population of gene edited immune cells, wherein:
the immune cells are genetically edited within a target sequence in a MED12 gene comprising any one of SEQ ID NOS: 938-944 and 996-998; and
the edit yields reduced expression of a MED12 protein encoded by the MED12 gene, as compared to an immune cell not edited within the target sequence in the MED12 gene.

94. A composition comprising the population of gene edited immune cells of claim 93.

95. A method for the treatment of a subject having a disease or condition comprising administering to the subject the composition of claim 94.

96. A population of gene edited immune cells, wherein:
the immune cells are genetically edited within a target sequence in a disintegrin and metalloproteinase domain-containing protein 17 (ADAM17) gene comprising any one of SEQ ID NOS: 682-687; and
the edit yields reduced expression of an ADAM17 protein encoded by the ADAM17 gene, as compared to an immune cell not edited within the target sequence in the ADAM17 gene.

97. A composition comprising the population of gene edited immune cells of claim 96.

98. A population of gene edited immune cells, wherein:
the immune cells are genetically edited within a target sequence in a hypoxia-inducible factor 1-alpha (HIF1-a) gene comprising any one of SEQ ID NOS: 750-760; and
the edit yields reduced expression of the HIF1-a protein encoded by the HIF1-a gene, as compared to an immune cell not edited within the target sequence in the HIF1-a gene.

99. A composition comprising the population of gene edited immune cells of claim 98.

100. A method of manufacturing a population of genetically edited natural killer (NK) cells comprising:
(a) contacting a population of NK cells with a first RNA-guided endonuclease,
wherein the RNA-guided endonuclease edits within a target sequence in the MED12 gene to yield reduced levels of expression of the MED12 protein encoded by the MED12 gene, as compared to an immune cell not edited within the target sequence in the MED12 gene; and
(b) contacting the population of NK cells with a second RNA-guided endonuclease,
wherein the second RNA guided endonuclease edits within a target sequence in the CISH gene to yield reduced levels of expression of the CIS protein encoded by the CISH gene, as compared to an immune cell not edited within the target sequence in the CISH gene.

101. The method of claim 100, wherein the target sequence within the MED12 gene comprises any one of SEQ ID NOS: 938-944 and 996-998.

102. The method of claim 100, wherein the target sequence in the CISH gene comprises any one of SEQ ID NOS: 153-157, 463-466, 1012, and 1013.
